(19) United States
(12) Patent Application Publication
(10) Pub. No.: US 2006/0147946 A1
(43) Pub. Date: Jul. 6, 2006

(54) Novel calcium channel variants and methods of use thereof

(76) Inventors: Pinchas Akiva, Ramat-Gan (IL); Alexander Dlber, Rishon-LeZion (IL); Sarah Pollock, Tel-Aviv (IL); Zurit Levine, Herzlia (IL); Sergey Nemzer, RaAnana (IL); Vladimir Grebinskiy, Highland Park, NJ (US); Brian Meloon, Baltimore, MD (US); Andrew Olson, Northport, NJ (US); Avi Rosenberg, Kfar Saba (IL); Ami Haviv, Hod-HaSharon (IL); Shaul Zevin, Mevaseret Zion (IL); Tomer Zekhari, Givataim (IL); Zipi Shaged, Tel-Aviv (IL); Moshe Olshansky, Haifa (IL); Arial Farkash, Haifa (IL); Eyal Privman, Tel-Aviv (IL); Amit Novik, Beit-HaSharon (IL); Naomi Keren, Givat Shmuel (IL); Gad S. Cojocaru, Ramat-HaSharon (IL); Yossi Cohen, Banstead (GB); Ronen Shemesh, Modiln (IL); Osnat Sella-Tavor, Kfar Kish (IL); Liat Mintz, East Brunswick, NJ (US); Hanquing Xie, Lambertville, NJ (US); Dvir Dahary, Tel-Aviv (IL); Erez Levanon, Petach Tikva (IL); Shiri Freilich, Haifa (IL); Nili Beck, Kfar Saba (IL); Wei-Yong Zhu, Plainsboro, NJ (US); Alon Wasserman, New York, NY (US); Chen Chermesh, Mishmar HaShiva (IL); Idit Azar, Tel-Aviv (IL); Rotem Sorek, Rechovot (IL); Jeanne Bernstein, Kfar Yona (IL)

Correspondence Address: STAAS & HALSEY LLP, SUITE 700, 1201 NEW YORK AVENUE, N.W., WASHINGTON, DC, 20005, US

(21) Appl. No.: 11/051,725

(22) Filed: Jan. 27, 2005

Related U.S. Application Data
(60) Provisional application No. 60/539,129, filed on Jan. 27, 2004.

(51) Int. Cl. C12Q 1/68; C07H 21/04; C12P 21/06; C07K 14/705

(52) U.S. Cl. 435/6; 435/69.1; 435/320.1; 435/325; 530/350; 536/23.5

(57) ABSTRACT

Novel alpha 1 subunit splice variants, including nucleic and amino acid sequences. Methods of use thereof are also described.

### CROSS-REFERENCE TO RELATED APPLICATION(S)

[0001] This application is related to Novel Calcium Channel Variants and Methods of use thereof, and claims priority to the below U.S. provisional applications which are incorporated by reference herein:

[0002] Application No. 60/539,129 filed Jan. 27, 2004—Methods and Systems for Annotating Biomolecular Sequences

### SEQUENCE LISTING

[0003] The instant application contains a “lengthy” Sequence Listing which has been submitted via CD-R in lieu of a printed paper copy, and is hereby incorporated by reference in its entirety. Said CD-R, recorded on Apr. 16, 2005, are labeled CRF, “Copy 1” and “Copy 2”, respectively, and each contains only one identical 1.061 Mb file (18471010.APP).

### FIELD OF THE INVENTION

[0004] The present invention is of novel calcium channel splice variants, including nucleic acid sequences and amino acid sequences, and methods of use thereof.

### BACKGROUND OF THE INVENTION

[0005] Voltage-sensitive calcium channels, also termed voltage-gated calcium channels, have many important physiological functions, for example for regulating cardiac function. Cardiac and vascular smooth muscle cells have calcium channels within the cell membrane. Calcium influx through these channels initiates a process of electromechanical coupling which ultimately leads to muscle contraction.

[0006] Different voltage-gated calcium channels have different structures and are blocked by different drugs. For example, the L-type (or long lasting) calcium channel is blocked by dihydropyridines, phenylalkylamines, and benzothiazepines. The channel structure features four transmembrane domains that form the calcium channel as a pore through the membrane. L-type calcium channels are characterized by large sustained conductance and slow inactivation. These channels appear at high levels in the heart and smooth muscle, and are responsible for the plateau phase (slow inward current) of the action potential.

[0007] T-type calcium channels are structurally similar to L-type channels, but have different behavior. They inactivate rapidly, and are involved in cardiac pacemaker activity and triggering contraction in vascular smooth muscle. They have high abundance in SA (sinoatrial) nodal tissue but low abundance in adult ventricular myocardium (see below for a description of the effect of calcium channel function on heart function). These channels are typically less sensitive to calcium channel blockers that affect L-type calcium channels with the exception of mibefradil.

[0008] N-type calcium channels are found only in neuronal cells, and are generally not sensitive to the cardiac specific calcium channel blockers. N (neuronal), P (Purkinje cell), Q (granular cell) and R (toxin-resistant) channels can be distinguished depending on their tissue expression pattern and toxin sensitivity, respectively.

[0009] Various disorders are associated with calcium channel activity. A “disorder associated with calcium channel activity” as used herein is a physiological malfunction arising from inappropriate calcium channel behavior. Such disorders include, for example, but are not limited to cardiovascular disease, pulmonary hypertension, peripheral vascular disorder, migraine disorder, mania, epilepsy, depression, hyperuricemia, and asthma (achalasia asthma and bronchial asthma).

[0010] Part of the importance of classifying calcium channels according to their sensitivity to calcium channel blockers is that the above diseases may be treated through the use of calcium channel blockers, which reduce calcium influx through the channel.

[0011] Calcium channel blockers are a chemically diverse class of compounds having important therapeutic value in the control of a variety of diseases including several cardiovascular disorders, such as hypertension, angina, and cardiac arrhythmias (Fleckenstein, Cir. Res. v. 52, (suppl. 1), p. 13-16 (1983); Fleckenstein, Experimental Facts and Therapeutic Prospects, John Wiley, New York (1983); McCall, D., Curr Pract Cardiol, v. 10, p. 1-11 (1985)).

[0012] These drugs prevent or slow the entry of calcium into cells by regulating cellular calcium channels. (Remington, The Science and Practice of pharmacy, Nineteenth Edition, Mack Publishing Company, Eaton, Pa., p. 963 (1995)). The regulation of calcium entry into the cells of the cardiovascular system is highly important for proper cardiac activity. The ability to regulate the entry of calcium into cardiac and vascular smooth muscle cells is a powerful therapeutic approach in the treatment of angina and hypertension respectively. Likewise, blocking calcium influx into cardiac tissues and conduction systems provides a useful approach to control certain types of arrhythmia.

[0013] Calcium channel blockers are also believed to be useful in the treatment of other disorders in which the regulation of calcium plays a role in normal hemostasis. Such disorders include, for example, pulmonary hypertension, peripheral vascular disease, mild congestive heart failure, hypertrophic subaortic stenosis, protection against ischemic injury, stroke, migraine, tumor resistance to anti-neoplastic drugs, achalasia, esophageal spasms, bronchial asthma, premature labor, dysmenorrhea, and enhancement of success in renal transplantation. (Remington, The Science and Practice of Pharmacy, Nineteenth Edition, Mack Publishing Company, Eaton, Pa., p. 963 (1995)).

[0014] Most of the currently available calcium channel blockers belong to one of three major chemical groups of drugs, the dihydropyridines, such as nifedipine, the phenyl alkyl amines, such as verapamil, and the benzothiazepines such as diltiazem.

[0015] Negative inotropic effects are seen with some of the L-type channel blockers (a direct effect on myocardial L-type channels). These effects result in reduced force of contraction of the myocardium. Therefore, these blockers are avoided in individuals with cardiomyopathy, or weakened heart muscle.

[0016] The negative inotropic effect is due to reduced inward movement of Ca++ during the action potential plateau phase (due to inhibition of slow (L-type) channel). Some calcium channel blockers, such as dihydropyridines, have very modest negative inotropic effects. Mibefradil (a T-type channel blocker) has no negative inotropic effects because there appear to be few T-type channels in adult ventricular muscle.

[0017] Negative chronotropic/dromotropic effects (pacemaker activity/conduction velocity) are also seen with some of the Ca++ channel blockers. Negative chronotropic effects result in slowing of the rate of myocardial contraction (time between p waves). Dromotropic effects relate to the time that the heart requires complete a single cycle of contraction (the p-t interval).

[0018] Verapamil (and to a lesser extent diltiazem) decreases the rate of recovery of the slow channel in AV conduction system and SA node, and therefore acts directly to depress SA node pacemaker activity and slow conduction. Contraction starts with depolarization of the SA (sinoatrial) node, followed by a wave of depolarization of the atrial tissue and contraction of the atria, causing blood to pour into the ventricles. The AV (atrioventricular) node depolarizes and causes the ventricles to contract, thereby pumping blood out of the heart and into the circulatory system.

[0019] Ca++-channel block by verapamil and diltiazem is frequency- and voltage-dependent, making them more effective in cells that are rapidly depolarizing. Mibefradil has negative chronotropic and dromotropic effects.

[0020] T-type channels are important for regulating Ca++ influx in pacemaker cells and cells of the conduction system. Nifedipine and related dihydropyridines do not have significant direct effects on the atrioventricular conduction system or sinoatrial node at normal doses, and therefore do not have direct effects on conduction or automaticity. Dihydropyridines can cause reflex increases in heart rate because of their potent vasodilating effects.

[0021] Hemodynamic effects of calcium channel blockers used as drugs tend to include decreasing coronary vascular resistance and increasing coronary blood flow, as well as decreasing peripheral resistance via vasodilatation of arterioles. However, these drugs typically do not affect venous tone.

[0022] The structure of calcium channels is important for their sensitivity to different calcium channel blockers. Certain calcium channel splice variants are known, but their function is not always understood. Furthermore, splice variants may have important physiological and regulatory effects on tissues for which calcium channel function is important, such as for cardiac tissue for example. However, these effects have not been explored and their overall importance on cardiac physiology and function, and the physiology and function of other such tissues that are affected by calcium channel function, is not known.

[0023] Therefore, exploration of calcium channel splice variants would clearly be useful to develop new drugs and to understand the physiological importance of such splice variants.

### SUMMARY OF THE INVENTION

[0024] The present invention provides a plurality of different splice variants of the voltage-gated calcium channel alpha subunit, which is a very important subunit in terms of the regulation of calcium channel function.

[0025] According to preferred embodiments of the present invention, there is provided an isolated polynucleotide comprising a nucleic acid sequence according to any of SEQ ID NO 23-44, or the complement thereof. Preferably, the nucleic acid comprises a polynucleotide encoding for the amino acid sequence of any of SEQ ID NOs 1-22. Optionally and preferably, the nucleotide sequence encodes for a polypeptide consisting of the amino acid sequence of any of SEQ ID NOs 1-22.

[0026] According to other preferred embodiments of the present invention, there is provided an isolated polypeptide comprising a polypeptide according to any of SEQ ID NOs 1-22. Preferably, the polypeptide consists of the amino acid sequence according to any of SEQ ID NOs 1-22.

[0027] According to preferred embodiments of the present invention, there is provided an expression vector comprising a nucleotide sequence encoding for any of SEQ ID NOs 1-22, wherein the nucleotide sequence is transcriptionally coupled to an exogenous promoter. Preferably, the nucleotide sequence encodes for a polypeptide consisting of the amino acid sequence according to any of SEQ ID NOs 1-22. More preferably, the nucleotide sequence comprises any of SEQ ID NO 23-44. Optionally and more preferably, the nucleotide sequence consists of the sequence of any of SEQ ID NO 23-44.

[0028] According to preferred embodiments of the present invention, there is provided a recombinant cell comprising the expression vector of claim 6, wherein the cell comprises an RNA polymerase recognized by the promoter. Optionally, the recombinant cell is made by a process comprising the step of introducing the expression vector described herein into the cell.

[0029] According to preferred embodiments of the present invention, there is provided a method of preparing a splice variant polypeptide comprising growing the recombinant cell as described herein under conditions wherein the polypeptide is expressed from the expression vector.

[0030] According to preferred embodiments of the present invention, there is provided a method of screening for compounds able to bind selectively to a splice variant according to the present invention comprising the steps of: (a) providing a splice variant polypeptide according to any of SEQ ID NOs 1-22; (b) providing a WT protein polypeptide that is not the splice variant polypeptide, (c) contacting the splice variant polypeptide and the WT polypeptide with a test preparation comprising one or more compounds; and (d) determining the binding of the test preparation to the splice variant polypeptide and the WT polypeptide, wherein a test preparation which binds the splice variant polypeptide but does not bind the WT polypeptide contains a compound that selectively binds the splice variant polypeptide.

[0031] Preferably, the splice variant polypeptide is obtained by expression of the polypeptide from an expression vector comprising a polynucleotide encoding the amino acid sequence according to any of SEQ ID NOs 1-22. More preferably, the polypeptide consists of the amino acid sequence according to any of SEQ ID NOs 1-22.

[0032] According to preferred embodiments of the present invention, there is provided a method of screening for a compound able to bind to or interact with a splice variant protein or a fragment thereof comprising the steps of: (a) expressing a polypeptide comprising the amino acid sequence according to any of SEQ ID NOs 1-22 or fragment thereof from a recombinant nucleic acid; (b) providing to the polypeptide a labeled ligand that specifically binds to the polypeptide and a test preparation comprising one or more compounds; and (c) measuring the effect of the test preparation on binding of the labeled ligand to the polypeptide, wherein a test preparation that alters the binding of the labeled ligand to the polypeptide contains a compound that binds to or interacts with the polypeptide. Optionally, steps (b) and (c) are performed in vitro. Also optionally, steps (a), (b) and (c) are performed using a whole cell.

[0033] Preferably, the polypeptide is expressed from an expression vector. Also preferably, the ligand is a calcium channel-binder. More preferably, the polypeptide consists of an amino acid sequence according to any of SEQ ID NOs 1-22 or a fragment thereof. Most preferably, the test preparation contains one compound.

[0034] According to preferred embodiments of the present invention, preferably any of the nucleic acid and/or amino acid sequences described herein further comprises any sequence having at least about 70%, preferably at least about 80%, more preferably at least about 90%, most preferably at least about 95% homology thereto.

[0035] All nucleic acid sequences and/or amino acid sequences shown herein as embodiments of the present invention relate to their isolated form, as isolated polynucleotides (including for all transcripts), oligonucleotides (including for all segments, amplicons and primers), peptides (including for all tails, bridges, insertions or heads, optionally including other antibody epitopes as described herein) and/or polypeptides (including for all proteins). It should be noted that oligonucleotide and polynucleotide, or peptide and polypeptide, may optionally be used interchangeably.

[0036] It should be noted that for the sequence listing, the amino acid sequences are listed first. The nucleic acid sequences are listed next according to the following nomenclature for the sequence names: SEQ ID NO:23

[0037] >T80376_T2 (1 T80376_P2)

[0038] For this name, the variant protein name appears in parentheses, proceeded by the relevant amino acid SEQ ID NO.

### BRIEF DESCRIPTION OF THE DRAWINGS

[0039] The invention is herein described, by way of example only, with reference to the accompanying drawings. With specific reference now to the drawings in detail, it is stressed that the particulars shown are by way of example and for purposes of illustrative discussion of the preferred embodiments of the present invention only, and are presented in the cause of providing what is believed to be the most useful and readily understood description of the principles and conceptual aspects of the invention. In this regard, no attempt is made to show structural details of the invention in more detail than is necessary for a fundamental understanding of the invention, the description taken with the drawings making apparent to those skilled in the art how the several forms of the invention may be embodied in practice.

[0040] In the drawings:

[0041] FIG. 1: Mutually exclusive behavior gives two different transcripts; each of them contains one of the mutually exclusive exons (marked as green and yellow boxes).

[0042] FIG. 2 illustrates some aspects of an embodiment of the present invention with regard to mutually exclusive exons in the CACNA1C gene (SEQ ID NOS 189-190, respectively).

[0043] FIG. 3 shows an example for one possibly novel mutually exclusive exon in the SORCS3 gene (from UCSC genome browser, genome.ucsc.edu). The common exon is marked by an orange arrow and the putative exon is marked by red arrow. Only one human mRNA supports this gene. The two hills marked by orange and red circles, depict areas of human-mouse high conservation.

### DESCRIPTION OF PREFERRED EMBODIMENTS

[0044] Voltage gated calcium channels usually (although not necessarily) feature five subunits arranged in a complex that includes a pore through which the calcium ion may enter the cell. The alpha 1 subunit forms the pore itself and is encoded by CACNA1 genes. In order to form a functional calcium channel complex, the alpha 1 subunit coassembles with at least three accessory subunits encoded by two gene families: an intracellular beta subunit encoded by a CACNB gene, and an extracellular alpha 2 subunit linked by a di-sulphide bond to the membrane-anchoring delta subunit, both of which are encoded by a CACNA2D gene. In skeletal muscle, an additional accessory transmembranal gamma subunit is part of the channel complex. For at least some variants, such as the LVA channel (T-type), only the alpha subunit is required for functionality.

[0045] The alpha 1 subunit of the channel has a typical structural motif which involves four domains, each containing a series of six transmembrane alpha-helical segments, numbered S1-S6, which are connected by both intracellular and extracellular loops. The alpha 1 subunit itself determines the main characteristics of the cation channel complex such as its ion selectivity, voltage sensitivity, pharmacology (particularly sensitivity to calcium channel blockers) and binding characteristics for endogenous and exogenous ligands. The voltage sensitivity of cation channels is determined by the S4 segments, which are thought to move outward upon depolarization causing the channels to open. Calcium flows through the ion conducting pore, which is thought to be lined by the S5-S6 loops of all four domains. Although the activation gate is believed to lie within the pore formed by the alpha 1 subunit, the location of the inactivation gate is not clear.

[0046] The alpha 1 subunits are encoded by only ten different genes that are known to date, yet (in combination with the accessory subunits) these alpha 1 subunits must mediate a wide variety of functions. These functions are specific to particular types of calcium channels as described above. Furthermore, malfunction of calcium channels can result in markedly different disease patterns and characteristics, which further demonstrates the wide variety of functions achieved with such a small number of different genes. Structural diversity of alpha 1 subunits, and hence functional diversity, is increased through splice variants. Different splice variants of alpha 1 subunits may have strikingly different structures and hence different functions.

[0047] Alternative splicing is a process by which several mRNA isoforms can be generated from a single gene. It occurs by using different 5′-3′ pairs of splice sites while processing different molecules of the same pre-mRNA. Alternative splicing involving coding exons results in the production of several proteins from the same mRNA. Some alternative splicing events are obligatory, causing the production of two or more mRNA variants at constant ratios in all cells in which the gene is expressed. Other events are facultative and depend on such factors as sex, cell type, developmental stage, or physiological signals. Alternative splicing increases the diversity of the protein inventory within and between cells, and adds an additional regulatory dimension to the expression pattern of the organism.

[0048] In order to obtain mature mRNA which can be directly translated into a protein sequence, the non-coding regions corresponding to introns of the DNA must be removed from the precursor pre-mRNA by the splicing process. The borders of these introns are determined according to patterns of typical nucleotide sequences within the intron and adjacent exons.

[0049] Voltage-gated calcium channels are thought to have evolved by multiple gene duplication from a common ancestral channel gene encoding a one-domain potassium channel. The intron-exon boundaries have been shown to be conserved between different CACNA1 genes and also between species. The gene structure within the CACNA1 gene family is generally well conserved at coding regions for segments S1-S5 of all four domains. The remaining regions, especially those coding for the domain interlinkers and the S6 segments of all four domains, show less conserved gene structure suggesting that these portions of the protein vary in order to provide the required functional diversity. These less conserved coding regions coincide with the regions in which alternative splicing to result in the production of different transcripts, and hence different proteins, with similar function and sequence but different expression patterns, also known as splice isoforms.

[0050] Specific examples of splice variants of alpha 1 subunits of calcium channels are described in greater detail below. The effect of the changed amino acid sequence, and hence structure of the alpha 1 subunit protein, on calcium channel function is also described in greater detail below. These functional differences may optionally be exploited in order to better design small molecules and/or other drugs for regulating calcium channel function, for example in order to design a drug that either specifically binds or alternatively specifically does not bind to a particular variant calcium channel, determined by a type of alpha 1 subunit splice variant that is present. Various preferred embodiments of the present invention related to these calcium channel splice variants are described in greater detail below.

[0051] Some of the splice variants of the present invention feature mutually exclusive exons with regard to the known protein (WT or wild type protein). Mutually exclusive exons are two exons that are alternatively spliced in a unique way: if one of them is included in the transcript, the other one is not, and vice versa (FIG. 1). Of the known alternative splicing events, 9% are of the mutually exclusive exon type. Mutually exclusive exons are located in tandem and are usually flanked by introns of different phases (the relative position of the intron within or between codons). Thus, if both exons were incorporated into the same product it would result in frameshift that will lead to nonsense transcript. Examples 2, 4, 5, 15 and 19 below feature mutually exclusive exons.

[0052] According to preferred embodiments of the present invention, the present invention optionally and preferably encompasses any amino acid sequence or fragment thereof encoded by a nucleic acid sequence corresponding to a splice variant protein as described herein, including any oligopeptide or peptide relating to such an amino acid sequence or fragment, including but not limited to the unique amino acid sequences of these proteins that are depicted as tails, heads, insertions, edges or bridges. The present invention also optionally encompasses antibodies capable of recognizing, and/or being elicited by, such oligopeptides or peptides.

[0053] The present invention also optionally and preferably encompasses any nucleic acid sequence or fragment thereof, or amino acid sequence or fragment thereof, corresponding to a splice variant of the present invention as described above, optionally for any application.

[0054] In another embodiment, the present invention relates to bridges, tails, heads and/or insertions, and/or analogs, homologs and derivatives of such peptides. Such bridges, tails, heads and/or insertions are described in greater detail below with regard to the Examples.

[0055] As used herein a “tail” refers to a peptide sequence at the end of an amino acid sequence that is unique to a splice variant according to the present invention. Therefore, a splice variant having such a tail may optionally be considered as a chimera, in that at least a first portion of the splice variant is typically highly homologous (often 100% identical) to a portion of the corresponding known protein, while at least a second portion of the variant comprises the tail.

[0056] As used herein a “head” refers to a peptide sequence at the beginning of an amino acid sequence that is unique to a splice variant according to the present invention. Therefore, a splice variant having such a head may optionally be considered as a chimera, in that at least a first portion of the splice variant comprises the head, while at least a second portion is typically highly homologous (often 100% identical) to a portion of the corresponding known protein.

[0057] As used herein “an edge portion” refers to a connection between two portions of a splice variant according to the present invention that were not joined in the wild type or known protein. An edge may optionally arise due to a join between the above “known protein” portion of a variant and the tail, for example, and/or may occur if an internal portion of the wild type sequence is no longer present, such that two portions of the sequence are now contiguous in the splice variant that were not contiguous in the known protein. A “bridge” may optionally be an edge portion as described above, but may also include a join between a head and a “known protein” portion of a variant, or a join between a tail and a “known protein” portion of a variant, or a join between an insertion and a “known protein” portion of a variant.

[0058] Optionally and preferably, a bridge between a tail or a head or a unique insertion, and a “known protein” portion of a variant, comprises at least about 10 amino acids, more preferably at least about 20 amino acids, most preferably at least about 30 amino acids, and even more preferably at least about 40 amino acids, in which at least one amino acid is from the tail/head/insertion and at least one amino acid is from the “known protein” portion of a variant. Also optionally, the bridge may comprise any number of amino acids from about 10 to about 40 amino acids (for example, 10, 11, 12, 13 . . . 37, 38, 39, 40 amino acids in length, or any number in between).

[0059] It should be noted that a bridge cannot be extended beyond the length of the sequence in either direction, and it should be assumed that every bridge description is to be read in such manner that the bridge length does not extend beyond the sequence itself.

[0060] Furthermore, bridges are described with regard to a sliding window in certain contexts below. For example, certain descriptions of the bridges feature the following format: a bridge between two edges (in which a portion of the known protein is not present in the variant) may optionally be described as follows: a bridge portion of CONTIG-NAME_P1 (representing the name of the protein), comprising a polypeptide having a length “n”, wherein n is at least about 10 amino acids in length, optionally at least about 20 amino acids in length, preferably at least about 30 amino acids in length, more preferably at least about 40 amino acids in length and most preferably at least about 50 amino acids in length, wherein at least two amino acids comprise XX (2 amino acids in the center of the bridge, one from each end of the edge), having a structure as follows (numbering according to the sequence of CONTIG-NAME_P1): a sequence starting from any of amino acid numbers 49−x to 49 (for example); and ending at any of amino acid numbers 50+((n−2)−x) (for example), in which x varies from 0 to n−2. In this example, it should also be read as including bridges in which n is any number of amino acids between 10-50 amino acids in length. Furthermore, the bridge polypeptide cannot extend beyond the sequence, so it should be read such that 49−x (for example) is not less than 1, nor 50+((n−2)−x) (for example) greater than the total sequence length.

[0061] In another embodiment, this invention provides antibodies specifically recognizing the splice variants and polypeptide fragments thereof of this invention. Preferably such antibodies differentially recognize splice variants of the present invention but do not recognize a corresponding known protein (such known proteins are discussed with regard to their splice variants in the Examples below).

[0062] In another embodiment, this invention provides an isolated nucleic acid molecule encoding for a splice variant according to the present invention, having a nucleotide sequence as set forth in any one of the sequences listed herein, or a sequence complementary thereto. In another embodiment, this invention provides an isolated nucleic acid molecule, having a nucleotide sequence as set forth in any one of the sequences listed herein, or a sequence complementary thereto. In another embodiment, this invention provides an oligonucleotide of at least about 12 nucleotides, specifically hybridizable with the nucleic acid molecules of this invention. In another embodiment, this invention provides vectors, cells, liposomes and compositions comprising the isolated nucleic acids of this invention.

[0063] Nucleic Acid Sequences and Oligonucleotides

[0064] Various embodiments of the present invention encompass nucleic acid sequences described hereinabove; fragments thereof, sequences hybridizable therewith, sequences homologous thereto, sequences encoding similar polypeptides with different codon usage, altered sequences characterized by mutations, such as deletion, insertion or substitution of one or more nucleotides, either naturally occurring or artificially induced, either randomly or in a targeted fashion.

[0065] The present invention encompasses nucleic acid sequences described herein; fragments thereof, sequences hybridizable therewith, sequences homologous thereto [e.g., at least 50%, at least 55%, at least 60%, at least 65%, at least 70%, at least 75%, at least 80%, at least 85%, at least 95% or more say 100% identical to the nucleic acid sequences set forth below], sequences encoding similar polypeptides with different codon usage, altered sequences characterized by mutations, such as deletion, insertion or substitution of one or more nucleotides, either naturally occurring or man induced, either randomly or in a targeted fashion. The present invention also encompasses homologous nucleic acid sequences (i.e., which form a part of a polynucleotide sequence of the present invention) which include sequence regions unique to the polynucleotides of the present invention.

[0066] In cases where the polynucleotide sequences of the present invention encode previously unidentified polypeptides, the present invention also encompasses novel polypeptides or portions thereof, which are encoded by the isolated polynucleotide and respective nucleic acid fragments thereof described hereinabove.

[0067] Thus, the present invention provides isolated polynucleotides each encoding a polypeptide which is at least 50%, at least 55%, at least 60%, at least 65%, at least 70%, at least 75%, at least 80%, %, at least 85%, %, at least 90%, at least 95% or more, say 100% identical to a polypeptide sequence listed in the Examples section or sequence listing, as determined using the LALIGN software of EMBnet switzerland (http://www.ch.embnet.org/index.html) using default parameters.

[0068] A “nucleic acid fragment” or an “oligonucleotide” or a “polynucleotide” are used herein interchangeably to refer to a polymer of nucleic acids. A polynucleotide sequence of the present invention refers to a single or double stranded nucleic acid sequences which is isolated and provided in the form of an RNA sequence, a complementary polynucleotide sequence (cDNA), a genomic polynucleotide sequence and/or a composite polynucleotide sequences (e.g., a combination of the above).

[0069] As used herein the phrase “complementary polynucleotide sequence” refers to a sequence, which results from reverse transcription of messenger RNA using a reverse transcriptase or any other RNA dependent DNA polymerase. Such a sequence can be subsequently amplified in vivo or in vitro using a DNA dependent DNA polymerase.

[0070] As used herein the phrase “genomic polynucleotide sequence” refers to a sequence derived (isolated) from a chromosome and thus it represents a contiguous portion of a chromosome.

[0071] As used herein the phrase “composite polynucleotide sequence” refers to a sequence, which is composed of genomic and cDNA sequences. A composite sequence can include some exonal sequences required to encode the polypeptide of the present invention, as well as some intronic sequences interposing therebetween. The intronic sequences can be of any source, including of other genes, and typically will include conserved splicing signal sequences. Such intronic sequences may further include cis acting expression regulatory elements.

[0072] Preferred embodiments of the present invention encompass oligonucleotide probes.

[0073] An example of an oligonucleotide probe which can be utilized by the present invention is a single stranded polynucleotide which includes a sequence complementary to the unique sequence region of any variant according to the present invention, including but not limited to a nucleotide sequence coding for an amino sequence of a bridge, tail, head and/or insertion according to the present invention, and/or the equivalent portions of any nucleotide sequence given herein (including but not limited to a nucleotide sequence of a node, segment or amplicon described herein).

[0074] Alternatively, an oligonucleotide probe of the present invention can be designed to hybridize with a nucleic acid sequence encompassed by any of the above nucleic acid sequences, particularly the portions specified above, including but not limited to a nucleotide sequence coding for an amino sequence of a bridge, tail, head and/or insertion according to the present invention, and/or the equivalent portions of any nucleotide sequence given herein (including but not limited to a nucleotide sequence of a node, segment or amplicon described herein).

[0075] Oligonucleotides designed according to the teachings of the present invention can be generated according to any oligonucleotide synthesis method known in the art such as enzymatic synthesis or solid phase synthesis. Equipment and reagents for executing solid-phase synthesis are commercially available from, for example, Applied Biosystems. Any other means for such synthesis may also be employed; the actual synthesis of the oligonucleotides is well within the capabilities of one skilled in the art and can be accomplished via established methodologies as detailed in, for example, “Molecular Cloning: A laboratory Manual” Sambrook et al., (1989); “Current Protocols in Molecular Biology” Volumes I-III Ausubel, R. M., ed. (1994); Ausubel et al., “Current Protocols in Molecular Biology”, John Wiley and Sons, Baltimore, Md. (1989); Perbal, “A Practical Guide to Molecular Cloning”, John Wiley & Sons, New York (1988) and “Oligonucleotide Synthesis” Gait, M. J., ed. (1984) utilizing solid phase chemistry, e.g. cyanoethyl phosphoramidite followed by deprotection, desalting and purification by for example, an automated trityl-on method or HPLC.

[0076] Oligonucleotides used according to this aspect of the present invention are those having a length selected from a range of about 10 to about 200 bases preferably about 15 to about 150 bases, more preferably about 20 to about 100 bases, most preferably about 20 to about 50 bases. Preferably, the oligonucleotide of the present invention features at least 17, at least 18, at least 19, at least 20, at least 22, at least 25, at least 30 or at least 40, bases specifically hybridizable with the biomarkers of the present invention.

[0077] The oligonucleotides of the present invention may comprise heterocylic nucleosides consisting of purines and the pyrimidines bases, bonded in a 3′ to 5′ phosphodiester linkage.

[0078] Preferably used oligonucleotides are those modified at one or more of the backbone, internucleoside linkages or bases, as is broadly described hereinunder.

[0079] Specific examples of preferred oligonucleotides useful according to this aspect of the present invention include oligonucleotides containing modified backbones or non-natural internucleoside linkages. Oligonucleotides having modified backbones include those that retain a phosphorus atom in the backbone, as disclosed in U.S. Pat. Nos. 4,469,863; 4,476,301; 5,023,243; 5,177,196; 5,188,897; 5,264,423; 5,276,019; 5,278,302; 5,286,717; 5,321,131; 5,399,676; 5,405,939; 5,453,496; 5,455,233; 5,466, 677; 5,476,925; 5,519,126; 5,536,821; 5,541,306; 5,550,111; 5,563,253; 5,571,799; 5,587,361; and 5,625,050.

[0080] Preferred modified oligonucleotide backbones include, for example, phosphorothioates, chiral phosphorothioates, phosphorodithioates, phosphotriesters, aminoalkyl phosphotriesters, methyl and other alkyl phosphonates including 3′-alkylene phosphonates and chiral phosphonates, phosphinates, phosphoramidates including 3′-amino phosphoramidate and aminoalkylphosphoramidates, thionophosphoramidates, thionoalkylphosphonates, thionoalkylphosphotriesters, and boranophosphates having normal 3′-5′ linkages, 2′-5′ linked analogs of these, and those having inverted polarity wherein the adjacent pairs of nucleoside units are linked 3′-5′ to 5′-3′ or 2′-5′ to 5′-2′. Various salts, mixed salts and free acid forms can also be used.

[0081] Alternatively, modified oligonucleotide backbones that do not include a phosphorus atom therein have backbones that are formed by short chain alkyl or cycloalkyl internucleoside linkages, mixed heteroatom and alkyl or cycloalkyl internucleoside linkages, or one or more short chain heteroatomic or heterocyclic internucleoside linkages. These include those having morpholino linkages (formed in part from the sugar portion of a nucleoside); siloxane backbones; sulfide, sulfoxide and sulfone backbones; formacetyl and thioformacetyl backbones; methylene formacetyl and thioformacetyl backbones; alkene containing backbones; sulfamate backbones; methyleneimino and methylenehydrazino backbones; sulfonate and sulfonamide backbones; amide backbones; and others having mixed N, O, S and CH2 component parts, as disclosed in U.S. Pat. Nos. 5,034,506; 5,166,315; 5,185,444; 5,214,134; 5,216,141; 5,235,033; 5,264,562; 5,264,564; 5,405,938; 5,434,257; 5,466,677; 5,470,967; 5,489,677; 5,541,307; 5,561,225; 5,596,086; 5,602,240; 5,610,289; 5,602,240; 5,608,046; 5,610,289; 5,618,704; 5,623,070; 5,663,312; 5,633,360; 5,677,437; and 5,677,439.

[0082] Other oligonucleotides which can be used according to the present invention, are those modified in both sugar and the internucleoside linkage, i.e., the backbone, of the nucleotide units are replaced with novel groups. The base units are maintained for complementation with the appropriate polynucleotide target. An example for such an oligonucleotide mimetic, includes peptide nucleic acid (PNA). United States patents that teach the preparation of PNA compounds include, but are not limited to, U.S. Pat. Nos. 5,539,082; 5,714,331; and 5,719,262, each of which is herein incorporated by reference. Other backbone modifications, which can be used in the present invention are disclosed in U.S. Pat. No. 6,303,374.

[0083] Oligonucleotides of the present invention may also include base modifications or substitutions. As used herein, “unmodified” or “natural” bases include the purine bases adenine (A) and guanine (G), and the pyrimidine bases thymine (T), cytosine (C) and uracil (U). Modified bases include but are not limited to other synthetic and natural bases such as 5-methylcytosine (5-me-C), 5-hydroxymethyl cytosine, xanthine, hypoxanthine, 2-aminoadenine, 6-methyl and other alkyl derivatives of adenine and guanine, 2-propyl and other alkyl derivatives of adenine and guanine, 2-thiouracil, 2-thiothymine and 2-thiocytosine, 5-halouracil and cytosine, 5-propynyl uracil and cytosine, 6-azo uracil, cytosine and thymine, 5-uracil (pseudouracil), 4-thiouracil, 8-halo, 8-amino, 8-thiol, 8-thioalkyl, 8-hydroxyl and other 8-substituted adenines and guanines, 5-halo particularly 5-bromo, 5-trifluoromethyl and other 5-substituted uracils and cytosines, 7-methylguanine and 7-methyladenine, 8-azaguanine and 8-azaadenine, 7-deazaguanine and 7-deazaadenine and 3-deazaguanine and 3-deazaadenine. Further bases particularly useful for increasing the binding affinity of the oligomeric compounds of the invention include 5-substituted pyrimidines, 6-azapyrimidines and N-2, N-6 and O-6 substituted purines, including 2-aminopropyladenine, 5-propynyluracil and 5-propynylcytosine. 5-methylcytosine substitutions have been shown to increase nucleic acid duplex stability by 0.6-1.2° C. and are presently preferred base substitutions, even more particularly when combined with 2′-O-methoxyethyl sugar modifications.

[0084] Another modification of the oligonucleotides of the invention involves chemically linking to the oligonucleotide one or more moieties or conjugates, which enhance the activity, cellular distribution or cellular uptake of the oligonucleotide. Such moieties include but are not limited to lipid moieties such as a cholesterol moiety, cholic acid, a thioether, e.g., hexyl-S-tritylthiol, a thiocholesterol, an aliphatic chain, e.g., dodecandiol or undecyl residues, a phospholipid, e.g., di-hexadecyl-rac-glycerol or triethylammonium 1,2-di-O-hexadecyl-rac-glycero-3-H-phosphonate, a polyamine or a polyethylene glycol chain, or adamantane acetic acid, a palmityl moiety, or an octadecylamine or hexylamino-carbonyl-oxycholesterol moiety, as disclosed in U.S. Pat. No. 6,303,374.

[0085] It is not necessary for all positions in a given oligonucleotide molecule to be uniformly modified, and in fact more than one of the aforementioned modifications may be incorporated in a single compound or even at a single nucleoside within an oligonucleotide.

[0086] It will be appreciated that oligonucleotides of the present invention may include further modifications for more efficient use as diagnostic agents and/or to increase bioavailability, therapeutic efficacy and reduce cytotoxicity.

[0087] Expression of the Polynucleotide Sequence of the Present Invention

[0088] To enable cellular expression of the polynucleotides of the present invention, a nucleic acid construct (or an “expression vector”) according to the present invention may be used, which includes at least a coding region of one of the above nucleic acid sequences, and further includes at least one cis acting regulatory element. As used herein, the phrase “cis acting regulatory element” refers to a polynucleotide sequence, preferably a promoter, which binds a trans acting regulator and regulates the transcription of a coding sequence located downstream thereto.

[0089] Eukaryotic promoters typically contain two types of recognition sequences, the TATA box and upstream promoter elements. The TATA box, located 25-30 base pairs upstream of the transcription initiation site, is thought to be involved in directing RNA polymerase to begin RNA synthesis. The other upstream promoter elements determine the rate at which transcription is initiated.

[0090] Preferably, the promoter utilized by the nucleic acid construct of the present invention is active in the specific cell population transformed. Examples of cell type-specific and/or tissue-specific promoters include promoters such as albumin that is liver specific [Pinkert et al., (1987) Genes Dev. 1:268-277], lymphoid specific promoters [Calame et al., (1988) Adv. Immunol. 43:235-275]; in particular promoters of T-cell receptors [Winoto et al., (1989) EMBO J. 8:729-733] and immunoglobulins; [Banerji et al. (1983) Cell 33729-740], neuron-specific promoters such as the neurofilament promoter [Byrne et al. (1989) Proc. Natl. Acad. Sci. USA 86:5473-5477], pancreas-specific promoters [Edlunch et al. (1985) Science 230:912-916] or mammary gland-specific promoters such as the milk whey promoter (U.S. Pat. No. 4,873,316 and European Application Publication No. 264,166). The nucleic acid construct of the present invention can further include an enhancer, which can be adjacent or distant to the promoter sequence and can function in up regulating the transcription therefrom.

[0091] Enhancer elements can stimulate transcription up to 1,000 fold from linked homologous or heterologous promoters. Enhancers are active when placed downstream or upstream from the transcription initiation site. Many enhancer elements derived from viruses have a broad host range and are active in a variety of tissues. For example, the SV40 early gene enhancer is suitable for many cell types. Other enhancer/promoter combinations that are suitable for the present invention include those derived from polyoma virus, human or murine cytomegalovirus (CMV), the long term repeat from various retroviruses such as murine leukemia virus, murine or Rous sarcoma virus and HIV. See, Enhancers and Eukaryotic Expression, Cold Spring Harbor Press, Cold Spring Harbor, N.Y. 1983, which is incorporated herein by reference.

[0092] In the construction of the expression vector, the promoter is preferably positioned approximately the same distance from the heterologous transcription start site as it is from the transcription start site in its natural setting. As is known in the art, however, some variation in this distance can be accommodated without loss of promoter function.

[0093] Polyadenylation sequences can also be added to the expression vector in order to increase the efficiency of mRNA translation. Two distinct sequence elements are required for accurate and efficient polyadenylation: GU or U rich sequences located downstream from the polyadenylation site and a highly conserved sequence of six nucleotides, AAUAAA, located 11-30 nucleotides upstream. Termination and polyadenylation signals that are suitable for the present invention include those derived from SV40.

[0094] In addition to the elements already described, the expression vector of the present invention may typically contain other specialized elements intended to increase the level of expression of cloned nucleic acids or to facilitate the identification of cells that carry the recombinant DNA. For example, a number of animal viruses contain DNA sequences that promote the extra chromosomal replication of the viral genome in permissive cell types. Plasmids bearing these viral replicons are replicated episomally as long as the appropriate factors are provided by genes either carried on the plasmid or with the genome of the host cell.

[0095] The vector may or may not include a eukaryotic replicon. If a eukaryotic replicon is present, then the vector is amplifiable in eukaryotic cells using the appropriate selectable marker. If the vector does not comprise a eukaryotic replicon, no episomal amplification is possible. Instead, the recombinant DNA integrates into the genome of the engineered cell, where the promoter directs expression of the desired nucleic acid.

[0096] The expression vector of the present invention can further include additional polynucleotide sequences that allow, for example, the translation of several proteins from a single mRNA such as an internal ribosome entry site (IRES) and sequences for genomic integration of the promoter-chimeric polypeptide.

[0097] The nucleic acid construct of the present invention preferably further includes an appropriate selectable marker and/or an origin of replication. Preferably, the nucleic acid construct utilized is a shuttle vector, which can propagate both in E. coli (wherein the construct comprises an appropriate selectable marker and origin of replication) and be compatible for propagation in cells, or integration in a gene and a tissue of choice. The construct according to the present invention can be, for example, a plasmid, a bacmid, a phagemid, a cosmid, a phage, a virus or an artificial chromosome.

[0098] Examples of suitable constructs include, but are not limited to, pcDNA3, pcDNA3.1 (+/−), pGL3, PzeoSV2 (+/−), pDisplay, pEF/myc/cyto, pCMV/myc/cyto each of which is commercially available from Invitrogen Co. (www.invitrogen.com). Examples of retroviral vector and packaging systems are those sold by Clontech, San Diego, Calif., including Retro-X vectors pLNCX and pLXSN, which permit cloning into multiple cloning sites and the trasgene is transcribed from CMV promoter. Vectors derived from Mo-MuLV are also included such as pBabe, where the transgene will be transcribed from the 5′LTR promoter.

[0099] Viruses are very specialized infectious agents that have evolved, in many cases, to elude host defense mechanisms. Typically, viruses infect and propagate in specific cell types. The targeting specificity of viral vectors utilizes its natural specificity to specifically target predetermined cell types and thereby introduce a recombinant gene into the infected cell. Thus, the type of vector used by the present invention will depend on the cell type transformed. The ability to select suitable vectors according to the cell type transformed is well within the capabilities of the ordinary skilled artisan and as such no general description of selection consideration is provided herein. For example, bone marrow cells can be targeted using the human T cell leukemia virus type I (HTLV-I) and kidney cells may be targeted using the heterologous promoter present in the baculovirus Autographa californica nucleopolyhedrovirus (AcMNPV) as described in Liang C Y et al., 2004 (Arch Virol. 149: 51-60).

[0100] Recombinant viral vectors are useful for in vivo expression of the polynucleotide sequence of the present invention since they offer advantages such as lateral infection and targeting specificity. Lateral infection is inherent in the life cycle of, for example, retrovirus and is the process by which a single infected cell produces many progeny virions that bud off and infect neighboring cells. The result is that a large area becomes rapidly infected, most of which was not initially infected by the original viral particles. This is in contrast to vertical-type of infection in which the infectious agent spreads only through daughter progeny. Viral vectors can also be produced that are unable to spread laterally. This characteristic can be useful if the desired purpose is to introduce a specified gene into only a localized number of targeted cells.

[0101] Various methods can be used to introduce the expression vector of the present invention into stem cells. Such methods are generally described in Sambrook et al., Molecular Cloning: A Laboratory Manual, Cold Springs Harbor Laboratory, New York (1989, 1992), in Ausubel et al., Current Protocols in Molecular Biology, John Wiley and Sons, Baltimore, Md. (1989), Chang et al., Somatic Gene Therapy, CRC Press, Ann Arbor, Mich. (1995), Vega et al., Gene Targeting, CRC Press, Ann Arbor Mich. (1995), Vectors: A Survey of Molecular Cloning Vectors and Their Uses, Butterworths, Boston Mass. (1988) and Gilboa et at. [Biotechniques 4 (6): 504-512, 1986] and include, for example, stable or transient transfection, lipofection, electroporation and infection with recombinant viral vectors. In addition, see U.S. Pat. Nos. 5,464,764 and 5,487,992 for positive-negative selection methods.

[0102] Introduction of nucleic acids by viral infection offers several advantages over other methods such as lipofection and electroporation, since higher transfection efficiency can be obtained due to the infectious nature of viruses.

[0103] Currently preferred in vivo nucleic acid transfer techniques include transfection with viral or non-viral constructs, such as adenovirus, lentivirus, Herpes simplex I virus, or adeno-associated virus (AAV) and lipid-based systems. Useful lipids for lipid-mediated transfer of the gene are, for example, DOTMA, DOPE, and DC-Chol [Tonkinson et al., Cancer Investigation, 14(1): 54-65 (1996)]. The most preferred constructs for use in gene therapy are viruses, most preferably adenoviruses, AAV, lentiviruses, or retroviruses. A viral construct such as a retroviral construct includes at least one transcriptional promoter/enhancer or locus-defining element(s), or other elements that control gene expression by other means such as alternate splicing, nuclear RNA export, or post-translational modification of messenger. Such vector constructs also include a packaging signal, long terminal repeats (LTRs) or portions thereof, and positive and negative strand primer binding sites appropriate to the virus used, unless it is already present in the viral construct. In addition, such a construct typically includes a signal sequence for secretion of the peptide from a host cell in which it is placed. Preferably the signal sequence for this purpose is a mammalian signal sequence or the signal sequence of the polypeptide variants of the present invention. Optionally, the construct may also include a signal that directs polyadenylation, as well as one or more restriction sites and a translation termination sequence. By way of example, such constructs will typically include a 5′ LTR, a tRNA binding site, a packaging signal, an origin of second-strand DNA synthesis, and a 3′ LTR or a portion thereof. Other vectors can be used that are non-viral, such as cationic lipids, polylysine, and dendrimers.

[0104] Other than containing the necessary elements for the transcription and translation of the inserted coding sequence, the expression construct of the present invention can also include sequences engineered to enhance stability, production, purification, yield or toxicity of the expressed peptide. For example, the expression of a fusion protein or a cleavable fusion protein comprising Met variant of the present invention and a heterologous protein can be engineered. Such a fusion protein can be designed so that the fusion protein can be readily isolated by affinity chromatography; e.g., by immobilization on a column specific for the heterologous protein. Where a cleavage site is engineered between the Met moiety and the heterologous protein, the Met moiety can be released from the chromatographic column by treatment with an appropriate enzyme or agent that disrupts the cleavage site [e.g., see Booth et al. (1988) Immunol. Lett. 19:65-70; and Gardella et al., (1990) J. Biol. Chem. 265:15854-15859].

[0105] As mentioned hereinabove, a variety of prokaryotic or eukaryotic cells can be used as host-expression systems to express the polypeptides of the present invention. These include, but are not limited to, microorganisms, such as bacteria transformed with a recombinant bacteriophage DNA, plasmid DNA or cosmid DNA expression vector containing the coding sequence; yeast transformed with recombinant yeast expression vectors containing the coding sequence; plant cell systems infected with recombinant virus expression vectors (e.g., cauliflower mosaic virus, CaMV; tobacco mosaic virus, TMV) or transformed with recombinant plasmid expression vectors, such as Ti plasmid, containing the coding sequence. Mammalian expression systems can also be used to express the polypeptides of the present invention.

[0106] Examples of bacterial constructs include the pET series of E. coli expression vectors [Studier et al. (1990) Methods in Enzymol. 185:60-89).

[0107] In yeast, a number of vectors containing constitutive or inducible promoters can be used, as disclosed in U.S. Pat. No. 5,932,447. Alternatively, vectors can be used which promote integration of foreign DNA sequences into the yeast chromosome.

[0108] In cases where plant expression vectors are used, the expression of the coding sequence can be driven by a number of promoters. For example, viral promoters such as the 35S RNA and 19S RNA promoters of CaMV [Brisson et al. (1984) Nature 310:511-514], or the coat protein promoter to TMV [Takamatsu et al. (1987) EMBO J. 6:307-311] can be used. Alternatively, plant promoters such as the small subunit of RUBISCO [Coruzzi et al. (1984) EMBO J. 3:1671-1680 and Brogli et al., (1984) Science 224:838-843] or heat shock promoters, e.g., soybean hsp 17.5-E or hsp17.3-B [Gurley et al. (1986) Mol. Cell. Biol. 6:559-565] can be used. These constructs can be introduced into plant cells using Ti plasmid, R1 plasmid, plant viral vectors, direct DNA transformation, microinjection, electroporation and other techniques well known to the skilled artisan. See, for example, Weissbach & Weissbach, 1988, Methods for Plant Molecular Biology, Academic Press, NY, Section VIII, pp 421-463.

[0109] Other expression systems such as insects and mammalian host cell systems which are well known in the art and are further described hereinbelow can also be used by the present invention.

[0110] Recovery of the recombinant polypeptide is effected following an appropriate time in culture. The phrase “recovering the recombinant polypeptide” refers to collecting the whole fermentation medium containing the polypeptide and need not imply additional steps of separation or purification. Not withstanding the above, polypeptides of the present invention can be purified using a variety of standard protein purification techniques, such as, but not limited to, affinity chromatography, ion exchange chromatography, filtration, electrophoresis, hydrophobic interaction chromatography, gel filtration chromatography, reverse phase chromatography, concanavalin A chromatography, chromatofocusing and differential solubilization.

[0111] Hybridization Assays

[0112] Detection of a nucleic acid of interest in a biological sample may optionally be effected by hybridization-based assays using an oligonucleotide probe (non-limiting examples of probes according to the present invention were previously described).

[0113] Traditional hybridization assays include PCR, RT-PCR, Real-time PCR, RNase protection, in-situ hybridization, primer extension, Southern blots (DNA detection), dot or slot blots (DNA, RNA), and Northern blots (RNA detection) (NAT type assays are described in greater detail below). More recently, PNAs have been described (Nielsen et al. 1999, Current Opin. Biotechnol. 10:71-75). Other detection methods include kits containing probes on a dipstick setup and the like.

[0114] Hybridization based assays which allow the detection of a variant of interest (i.e., DNA or RNA) in a biological sample rely on the use of oligonucleotides which can be 10, 15, 20, or 30 to 100 nucleotides long preferably from 10 to 50, more preferably from 40 to 50 nucleotides long.

[0115] Thus, the isolated polynucleotides (oligonucleotides) of the present invention are preferably hybridizable with any of the herein described nucleic acid sequences under moderate to stringent hybridization conditions.

[0116] Moderate to stringent hybridization conditions are characterized by a hybridization solution such as containing 10% dextrane sulfate, 1 M NaCl, 1% SDS and 5×106 cpm 32P labeled probe, at 65° C., with a final wash solution of 0.2×SSC and 0.1% SDS and final wash at 65° C. and whereas moderate hybridization is effected using a hybridization solution containing 10% dextrane sulfate, 1 M NaCl, 1% SDS and 5×106 cpm 32P labeled probe, at 65° C., with a final wash solution of 1×SSC and 0.1% SDS and final wash at 50° C.

[0117] More generally, hybridization of short nucleic acids (below 200 bp in length, e.g. 17-40 bp in length) can be effected using the following exemplary hybridization protocols which can be modified according to the desired stringency; (i) hybridization solution of 6×SSC and 1% SDS or 3 M TMACI, 0.01 M sodium phosphate (pH 6.8), 1 mM EDTA (pH 7.6), 0.5% SDS, 100 mg/ml denatured salmon sperm DNA and 0.1% nonfat dried milk, hybridization temperature of 1-1.5° C. below the Tm, final wash solution of 3 M TMACI, 0.01 M sodium phosphate (pH 6.8), 1 mM EDTA (pH 7.6), 0.5% SDS at 1-1.5° C. below the Tm; (ii) hybridization solution of 6×SSC and 0.1% SDS or 3 M TMACI, 0.01 M sodium phosphate (pH 6.8), 1 mM EDTA (pH 7.6), 0.5% SDS, 100 mg/ml denatured salmon sperm DNA and 0.1% nonfat dried milk, hybridization temperature of 2-2.5° C. below the Tm, final wash solution of 3 M TMACI, 0.01 M sodium phosphate (pH 6.8), 1 mM EDTA (pH 7.6), 0.5% SDS at 1-1.5° C. below the Tm, final wash solution of 6×SSC, and final wash at 22° C.; (iii) hybridization solution of 6×SSC and 1% SDS or 3 M TMACI, 0.01 M sodium phosphate (pH 6.8), 1 mM EDTA (pH 7.6), 0.5% SDS, 100 mg/ml denatured salmon sperm DNA and 0.1% nonfat dried milk, hybridization temperature.

[0118] The detection of hybrid duplexes can be carried out by a number of methods. Typically, hybridization duplexes are separated from unhybridized nucleic acids and the labels bound to the duplexes are then detected. Such labels refer to radioactive, fluorescent, biological or enzymatic tags or labels of standard use in the art. A label can be conjugated to either the oligonucleotide probes or the nucleic acids derived from the biological sample.

[0119] Probes can be labeled according to numerous well known methods. Non-limiting examples of radioactive labels include 3H, 14C, 32P, and 35S. Non-limiting examples of detectable markers include ligands, fluorophores, chemiluminescent agents, enzymes, and antibodies. Other detectable markers for use with probes, which can enable an increase in sensitivity of the method of the invention, include biotin and radio-nucleotides. It will become evident to the person of ordinary skill that the choice of a particular label dictates the manner in which it is bound to the probe.

[0120] For example, oligonucleotides of the present invention can be labeled subsequent to synthesis, by incorporating biotinylated dNTPs or rNTP, or some similar means (e.g., photo-cross-linking a psoralen derivative of biotin to RNAs), followed by addition of labeled streptavidin (e.g., phycoerythrin-conjugated streptavidin) or the equivalent. Alternatively, when fluorescently-labeled oligonucleotide probes are used, fluorescein, lissamine, phycoerythrin, rhodamine (Perkin Elmer Cetus), Cy2, Cy3, Cy3.5, Cy5, Cy5.5, Cy7, FluorX (Amersham) and others [e.g., Kricka et al. (1992), Academic Press San Diego, Calif] can be attached to the oligonucleotides.

[0121] Those skilled in the art will appreciate that wash steps may be employed to wash away excess target DNA or probe as well as unbound conjugate. Further, standard heterogeneous assay formats are suitable for detecting the hybrids using the labels present on the oligonucleotide primers and probes.

[0122] It will be appreciated that a variety of controls may be usefully employed to improve accuracy of hybridization assays. For instance, samples may be hybridized to an irrelevant probe and treated with RNAse A prior to hybridization, to assess false hybridization.

[0123] Although the present invention is not specifically dependent on the use of a label for the detection of a particular nucleic acid sequence, such a label might be beneficial, by increasing the sensitivity of the detection. Furthermore, it enables automation. Probes can be labeled according to numerous well known methods.

As commonly known, radioactive nucleotides can be incorporated into probes of the invention by several methods. Non-limiting examples of radioactive labels include 3H, 14C, 32P, and 35S.

[0124] Those skilled in the art will appreciate that wash steps may be employed to wash away excess target DNA or probe as well as unbound conjugate. Further, standard heterogeneous assay formats are suitable for detecting the hybrids using the labels present on the oligonucleotide primers and probes.

[0125] It will be appreciated that a variety of controls may be usefully employed to improve accuracy of hybridization assays.

[0126] Probes of the invention can be utilized with naturally occurring sugar-phosphate backbones as well as modified backbones including phosphorothioates, dithionates, alkyl phosphonates and a-nucleotides and the like. Probes of the invention can be constructed of either ribonucleic acid (RNA) or deoxyribonucleic acid (DNA), and preferably of DNA.

[0127] Amino Acid Sequences and Peptides

[0128] The terms “polypeptide,” “peptide” and “protein” are used interchangeably herein to refer to a polymer of amino acid residues. The terms apply to amino acid polymers in which one or more amino acid residue is an analog or mimetic of a corresponding naturally occurring amino acid, as well as to naturally occurring amino acid polymers. Polypeptides can be modified, e.g., by the addition of carbohydrate residues to form glycoproteins. The terms “polypeptide,” “peptide” and “protein” include glycoproteins, as well as non-glycoproteins.

[0129] Polypeptide products can be biochemically synthesized such as by employing standard solid phase techniques. Such methods include but are not limited to exclusive solid phase synthesis, partial solid phase synthesis methods, fragment condensation, classical solution synthesis. These methods are preferably used when the peptide is relatively short (i.e., 10 kDa) and/or when it cannot be produced by recombinant techniques (i.e., not encoded by a nucleic acid sequence) and therefore involves different chemistry.

[0130] Solid phase polypeptide synthesis procedures are well known in the art and further described by John Morrow Stewart and Janis Dillaha Young, Solid Phase Peptide Syntheses (2nd Ed., Pierce Chemical Company, 1984).

[0131] Synthetic polypeptides can optionally be purified by preparative high performance liquid chromatography [Creighton T. (1983) Proteins, structures and molecular principles. WH Freeman and Co. N.Y.], after which their composition can be confirmed via amino acid sequencing.

[0132] In cases where large amounts of a polypeptide are desired, it can be generated using recombinant techniques such as described by Bitter et al., (1987) Methods in Enzymol. 153:516-544, Studier et al. (1990) Methods in Enzymol. 185:60-89, Brisson et al. (1984) Nature 310:511-514, Takamatsu et al. (1987) EMBO J. 6:307-311, Coruzzi et al. (1984) EMBO J. 3:1671-1680 and Brogli et al., (1984) Science 224:838-843, Gurley et al. (1986) Mol. Cell. Biol. 6:559-565 and Weissbach & Weissbach, 1988, Methods for Plant Molecular Biology, Academic Press, NY, Section VIII, pp 421-463.

[0133] The present invention also encompasses polypeptides encoded by the polynucleotide sequences of the present invention, as well as polypeptides according to the amino acid sequences described herein. The present invention also encompasses homologues of these polypeptides, such homologues can be at least 50%, at least 55%, at least 60%, at least 65%, at least 70%, at least 75%, at least 80%, at least 85%, at least 95% or more say 100% homologous to the amino acid sequences set forth below, as can be determined using BlastP software of the National Center of Biotechnology Information (NCBI) using default parameters, optionally and preferably including the following: filtering on (this option filters repetitive or low-complexity sequences from the query using the Seg (protein) program), scoring matrix is BLOSUM62 for proteins, word size is 3, E value is 10, gap costs are 11, 1 (initialization and extension), and number of alignments shown is 50. Finally, the present invention also encompasses fragments of the above described polypeptides and polypeptides having mutations, such as deletions, insertions or substitutions of one or more amino acids, either naturally occurring or artificially induced, either randomly or in a targeted fashion.

[0134] It will be appreciated that peptides identified according the present invention may be degradation products, synthetic peptides or recombinant peptides as well as peptidomimetics, typically, synthetic peptides and peptoids and semipeptoids which are peptide analogs, which may have, for example, modifications rendering the peptides more stable while in a body or more capable of penetrating into cells. Such modifications include, but are not limited to N terminus modification, C terminus modification, peptide bond modification, including, but not limited to, CH2—NH, CH2—S, CH2—S═O, O═C—NH, CH2—O, CH2—CH2, S═C—NH, CH═CH or CF═CH, backbone modifications, and residue modification. Methods for preparing peptidomimetic compounds are well known in the art and are specified. Further details in this respect are provided hereinunder.

[0135] Peptide bonds (—CO—NH—) within the peptide may be substituted, for example, by N-methylated bonds (—N(CH3)-CO—), ester bonds (—C(R)H—C—O—O—C(R)—N—), ketomethylen bonds (—CO—CH2-), *-aza bonds (—NH—N(R)—CO—), wherein R is any alkyl, e.g., methyl, carba bonds (—CH2—NH—), hydroxyethylene bonds (—CH(OH)—CH2-), thioamide bonds (—CS—NH—), olefinic double bonds (—CH═CH—), retro amide bonds (—NH—CO—), peptide derivatives (—N(R)—CH2-CO—), wherein R is the “normal” side chain, naturally presented on the carbon atom.

[0136] These modifications can occur at any of the bonds along the peptide chain and even at several (2-3) at the same time.

[0137] Natural aromatic amino acids, Trp, Tyr and Phe, may be substituted for synthetic non-natural acid such as Phenylglycine, TIC, naphthylelanine (Nol), ring-methylated derivatives of Phe, halogenated derivatives of Phe or o-methyl-Tyr.

[0138] In addition to the above, the peptides of the present invention may also include one or more modified amino acids or one or more non-amino acid monomers (e.g. fatty acids, complex carbohydrates etc).

[0139] As used herein in the specification and in the claims section below the term “amino acid” or “amino acids” is understood to include the 20 naturally occurring amino acids; those amino acids often modified post-translationally in vivo, including, for example, hydroxyproline, phosphoserine and phosphothreonine; and other unusual amino acids including, but not limited to, 2-aminoadipic acid, hydroxylysine, isodesmosine, nor-valine, nor-leucine and ornithine. Furthermore, the term “amino acid” includes both D- and L-amino acids.

[0140] Table 1 non-conventional or modified amino acids which can be used with the present invention.

TABLE 1

| Non-conventional amino acid | Code | Non-conventional amino acid | Code |
|---|---|---|---|
| α-aminobutyric acid | Abu | L-N-methylalanine | Nmala |
| α-amino-α-methylbutyrate | Mgabu | L-N-methylarginine | Nmarg |
| aminocyclopropane- | Cpro | L-N-methylasparagine | Nmasn |
| Carboxylate | | L-N-methylaspartic acid | Nmasp |
| aminoisobutyric acid | Aib | L-N-methylcysteine | Nmcys |
| aminonorbornyl- | Norb | L-N-methylglutamine | Nmgin |
| Carboxylate | | L-N-methylglutamic acid | Nmglu |
| Cyclohexylalanine | Chexa | L-N-methylhistidine | Nmhis |
| Cyclopentylalanine | Cpen | L-N-methylisolleucine | Nmile |
| D-alanine | Dal | L-N-methylleucine | Nmleu |
| D-arginine | Darg | L-N-methyllysine | Nmlys |
| D-aspartic acid | Dasp | L-N-methylmethionine | Nmmet |
| D-cysteine | Dcys | L-N-methylnorleucine | Nmnle |
| D-glutamine | Dgln | L-N-methylnorvaline | Nmnva |
| D-glutamic acid | Dglu | L-N-methylornithine | Nmorn |
| D-histidine | Dhis | L-N-methylphenylalanine | Nmphe |
| D-isoleucine | Dile | L-N-methylproline | Nmpro |
| D-leucine | Dleu | L-N-methylserine | Nmser |
| D-lysine | Dlys | L-N-methylthreonine | Nmthr |
| D-methionine | Dmet | L-N-methyltryptophan | Nmtrp |
| D-ornithine | Dorn | L-N-methyltyrosine | Nmtyr |
| D-phenylalanine | Dphe | L-N-methylvaline | Nmval |
| D-proline | Dpro | L-N-methylethylglycine | Nmetg |
| D-serine | Dser | L-N-methyl-t-butylglycine | Nmtbug |
| D-threonine | Dthr | L-norleucine | Nle |
| D-tryptophan | Dtrp | L-norvaline | Nva |
| D-tyrosine | Dtyr | α-methyl-aminoisobutyrate | Maib |
| D-valine | Dval | α-methyl-γ-aminobutyrate | Mgabu |
| D-α-methylalanine | Dmala | α-methylcyclohexylalanine | Mchexa |
| D-α-methylarginine | Dmarg | α-methylcyclopentylalanine | Mcpen |
| D-α-methylasparagine | Dmasn | α-methyl-α-napthylalanine | Manap |
| D-α-methylaspartate | Dmasp | α-methylpenicillamine | Mpen |
| D-α-methylcysteine | Dmcys | N-(4-aminobutyl)glycine | Nglu |
| D-α-methylglutamine | Dmgln | N-(2-aminoethyl)glycine | Naeg |
| D-α-methylhistidine | Dmhis | N-(3-aminopropyl)glycine | Norn |
| D-α-methylisoleucine | Dmile | N-amino-α-methylbutyrate | Nmaabu |
| D-α-methylleucine | Dmleu | α-napthylalanine | Anap |
| D-α-methyllysine | Dmlys | N-benzylglycine | Nphe |
| D-α-methylmethionine | Dmmet | N-(2-carbamylethyl)glycine | Ngln |
| D-α-methylornithine | Dmorn | N-(carbamylmethyl)glycine | Nasn |
| D-α-methylphenylalanine | Dmphe | N-(2-carboxyethyl)glycine | Nglu |
| D-α-methylproline | Dmpro | N-(carboxymethyl)glycine | Nasp |
| D-α-methylserine | Dmser | N-cyclobutylglycine | Ncbut |
| D-α-methylthreonine | Dmthr | N-cycloheptylglycine | Nchep |
| D-α-methyltryptophan | Dmtrp | N-cyclohexylglycine | Nchex |
| D-α-methyltyrosine | Dmty | N-cyclodecylglycine | Ncdec |
| D-α-methylvaline | Dmval | N-cyclododeclglycine | Ncdod |
| D-α-methylalnine | Dnmala | N-cyclooctylglycine | Ncoct |
| D-α-methylarginine | Dnmarg | N-cyclopropylglycine | Ncpro |
| D-α-methylasparagine | Dnmasn | N-cycloundecylglycine | Ncund |
| D-α-methylasparatate | Dnmasp | N-(2,2-diphenylethyl)glycine | Nbhm |
| D-α-methylcysteine | Dnmcys | N-(3,3- | Nbhe |
| | | diphenylpropyl)glycine | |
| D-N-methylleucine | Dnmleu | N-(3-indolylyethyl) glycine | Nhtrp |
| D-N-methyllysine | Dnmlys | N-methyl-γ-aminobutyrate | Nmgabu |
| N- | Nmchexa | D-N-methylmethionine | Dnmmet |
| methylcyclohexylalanine | | | |
| D-N-methylornithine | Dnmorn | N-methylcyclopentylalanine | Nmcpen |
| N-methylglycine | Nala | D-N-methylphenylalanine | Dnmphe |
| N-methylaminoisobutyrate | Nmaib | D-N-methylproline | Dnmpro |
| N-(1-methylpropyl)glycine | Nile | D-N-methylserine | Dnmser |
| N-(2-methylpropyl)glycine | Nile | D-N-methylserine | Dnmser |
| N-(2-methylpropyl)glycine | Nleu | D-N-methylthreonine | Dnmthr |
| D-N-methyltryptophan | Dnmtrp | N-(1-methylethyl)glycine | Nva |
| D-N-methyltyrosine | Dnmtyr | N-methyla-napthylalanine | Nmanap |
| D-N-methylvaline | Dnmval | N-methylpenicillamine | Nmpen |
| γ-aminobutyric acid | Gabu | N-(p-hydroxyphenyl)glycine | Nhtyr |
| L-t-butylglycine | Tbug | N-(thiomethyl)glycine | Ncys |
| L-ethylglycine | Etg | penicillamine | Pen |
| L-homophenylalanine | Hphe | L-α-methylalanine | Mala |
| L-α-methylarginine | Marg | L-α-methylasparagine | Masn |
| L-α-methylaspartate | Masp | L-α-methyl-t-butylglycine | Mtbug |
| L-α-methylcysteine | Mcys | L-methylethylglycine | Metg |
| L-α-methylglutamine | Mgln | L-α-methylglutamate | Mglu |
| L-α-methylhistidine | Mhis | L-α-methylhomo | Mhphe |
| | | phenylalanine | |
| L-α-methylisoleucine | Mile | N-(2-methylthioethyl)glycine | Nmet |
| D-N-methylglutamine | Dnmgln | N-(3- | Narg |
| | | guanidinopropyl)glycine | |
| D-N-methylglutamate | Dnmglu | N-(1-hydroxyethyl)glycine | Nthr |
| D-N-methylhistidine | Dnmhis | N-(hydroxyethyl)glycine | Nser |
| D-N-methylisoleucine | Dnmile | N-(imidazolylethyl)glycine | Nhis |
| D-N-methylleucine | Dnmleu | N-(3-indolylyethyl)glycine | Nhtrp |
| D-N-methyllysine | Dnmlys | N-methyl-γ-aminobutyrate | Nmgabu |
| N- | Nmchexa | D-N-methylmethionine | Dnmmet |
| methylcyclohexylalanine | | | |
| D-N-methylornithine | Dnmorn | N-methylcyclopentylalanine | Nmcpen |
| N-methylglycine | Nala | D-N-methylphenylalanine | Dnmphe |
| N-methylaminoisobutyrate | Nmaib | D-N-methylproline | Dnmpro |
| N-(1-methylpropyl)glycine | Nile | D-N-methylserine | Dnmser |
| N-(2-methylpropyl)glycine | Nleu | D-N-methylthreonine | Dnmthr |
| D-N-methyltryptophan | Dnmtrp | N-(1-methylethyl)glycine | Nval |
| D-N-methyltyrosine | Dnmtyr | N-methyla-napthylalanine | Nmanap |
| D-N-methylvaline | Dnmval | N-methylpenicillamine | Nmpen |
| γ-aminobutyric acid | Gabu | N-(p-hydroxyphenyl)glycine | Nhtyr |
| L-t-butylglycine | Tbug | N-(thiomethyl)glycine | Ncys |
| L-ethylglycine | Etg | penicillamine | Pen |
| L-homophenylalanine | Hphe | L-α-methylalanine | Mala |
| L-α-methylarginine | Marg | L-α-methylasparagine | Masn |
| L-α-methylaspartate | Masp | L-α-methyl-t-butylglycine | Mtbug |
| L-α-methylcysteine | Mcys | L-methylethylglycine | Metg |
| L-α-methylglutamine | Mgln | L-α-methylglutamate | Mglu |
| L-α-methylhistidine | Mhis | L-α- | Mhphe |
| | | methylhomophenylalanine | |
| L-α-methylisoleucine | Mile | N-2-methylthioethyl)glycine | Nmet |
| L-α-methylleucine | Mleu | L-α-methyllysine | Mlys |
| L-α-methylmethionine | Mmet | L-α-methylnorleucine | Mnle |
| L-α-methylnorvaline | Mnva | L-α-methylornithine | Morn |
| L-α-methylphenylalanine | Mphe | L-α-methylproline | Mpro |
| L-α-methylserine | mser | L-α-methylthreonine | Mthr |
| L-α-methylvaline | Mtrp | L-α-methyltyrosine | Mtyr |
| L-α-methylleucine | Mval | L-N- | Nmhphe |
| | Nnbhm | methylhomophenylalanine | |
| N-(N-(2,2-diphenylethyl) | | N-(N-(3,3-diphenylpropyl) | |
| carbamylmethyl-glycine | Nnbhm | carbamylmethyl(1)glycine | Nnbhe |
| 1-carboxy-1-(2,2-diphenyl | Nmbc | | |
| ethylamino)cyclopropane | | | |

[0141] Since the peptides of the present invention are preferably utilized in therapeutics which require the peptides to be in soluble form, the peptides of the present invention preferably include one or more non-natural or natural polar amino acids, including but not limited to serine and threonine which are capable of increasing peptide solubility due to their hydroxyl-containing side chain.

[0142] The peptides of the present invention are preferably utilized in a linear form, although it will be appreciated that in cases where cyclicization does not severely interfere with peptide characteristics, cyclic forms of the peptide can also be utilized.

[0143] The peptides of present invention can be biochemically synthesized such as by using standard solid phase techniques. These methods include exclusive solid phase synthesis well known in the art, partial solid phase synthesis methods, fragment condensation, classical solution synthesis. These methods are preferably used when the peptide is relatively short (i.e., 10 kDa) and/or when it cannot be produced by recombinant techniques (i.e., not encoded by a nucleic acid sequence) and therefore involves different chemistry.

[0144] Synthetic peptides can be purified by preparative high performance liquid chromatography and the composition of which can be confirmed via amino acid sequencing.

[0145] In cases where large amounts of the peptides of the present invention are desired, the peptides of the present invention can be generated using recombinant techniques such as described by Bitter et al., (1987) Methods in Enzymol. 153:516-544, Studier et al. (1990) Methods in Enzymol. 185:60-89, Brisson et al. (1984) Nature 310:511-514, Takamatsu et al. (1987) EMBO J. 6:307-311, Coruzzi et al. (1984) EMBO J. 3:1671-1680 and Brogli et al., (1984) Science 224:838-843, Gurley et al. (1986) Mol. Cell. Biol. 6:559-565 and Weissbach & Weissbach, 1988, Methods for Plant Molecular Biology, Academic Press, NY, Section VIII, pp 421-463 and also as described above.

[0146] Peptide sequences which exhibit high therapeutic activity, such as by competing with wild type signaling proteins of the same signaling pathway, can be also uncovered using computational biology. Software programs useful for displaying three-dimensional structural models, such as RIBBONS (Carson, M., 1997. Methods in Enzymology 277, 25), O (Jones, T A. et al., 1991. Acta Crystallogr. A47, 110), DINO (DINO: Visualizing Structural Biology (2001) http://www.dino3d.org); and QUANTA, INSIGHT, SYBYL, MACROMODE, ICM, MOLMOL, RASMOL and GRASP (reviewed in Kraulis, J., 1991. Appl Crystallogr. 24, 946) can be utilized to model interactions between the polypeptides of the present invention and prospective peptide sequences to thereby identify peptides which display the highest probability of binding for example to a respective ligand (e.g., IL-10). Computational modeling of protein-peptide interactions has been successfully used in rational drug design, for further details, see Lam et al., 1994. Science 263, 380; Wlodawer et al., 1993. Ann Rev Biochem. 62, 543; Appelt, 1993. Perspectives in Drug Discovery and Design 1, 23; Erickson, 1993. Perspectives in Drug Discovery and Design 1, 109, and Mauro M J. et al., 2002. J Clin Oncol. 20, 325-34.

[0147] Antibodies

[0148] “Antibody” refers to a polypeptide ligand that is preferably substantially encoded by an immunoglobulin gene or immunoglobulin genes, or fragments thereof, which specifically binds and recognizes an epitope (e.g., an antigen). The recognized immunoglobulin genes include the kappa and lambda light chain constant region genes, the alpha, gamma, delta, epsilon and mu heavy chain constant region genes, and the myriad-immunoglobulin variable region genes. Antibodies exist, e.g., as intact immunoglobulins or as a number of well characterized fragments produced by digestion with various peptidases. This includes, e.g., Fab′ and F(ab)′2 fragments. The term “antibody,” as used herein, also includes antibody fragments either produced by the modification of whole antibodies or those synthesized de novo using recombinant DNA methodologies. It also includes polyclonal antibodies, monoclonal antibodies, chimeric antibodies, humanized antibodies, or single chain antibodies. “Fc” portion of an antibody refers to that portion of an immunoglobulin heavy chain that comprises one or more heavy chain constant region domains, CH1, CH2 and CH3, but does not include the heavy chain variable region.

[0149] The functional fragments of antibodies, such as Fab, F(ab′)2, and Fv that are capable of binding to macrophages, are described as follows: (1) Fab, the fragment which contains a monovalent antigen-binding fragment of an antibody molecule, can be produced by digestion of whole antibody with the enzyme papain to yield an intact light chain and a portion of one heavy chain; (2) Fab′, the fragment of an antibody molecule that can be obtained by treating whole antibody with pepsin, followed by reduction, to yield an intact light chain and a portion of the heavy chain; two Fab′ fragments are obtained per antibody molecule; (3) (Fab′)₂, the fragment of the antibody that can be obtained by treating whole antibody with the enzyme pepsin without subsequent reduction; F(ab′)2 is a dimer of two Fab′ fragments held together by two disulfide bonds; (4) Fv, defined as a genetically engineered fragment containing the variable region of the light chain and the variable region of the heavy chain expressed as two chains; and (5) Single chain antibody (“SCA”), a genetically engineered molecule containing the variable region of the light chain and the variable region of the heavy chain, linked by a suitable polypeptide linker as a genetically fused single chain molecule.

[0150] Methods of producing polyclonal and monoclonal antibodies as well as fragments thereof are well known in the art (See for example, Harlow and Lane, Antibodies: A Laboratory Manual, Cold Spring Harbor Laboratory, New York, 1988, incorporated herein by reference).

[0151] Antibody fragments according to the present invention can be prepared by proteolytic hydrolysis of the antibody or by expression in E. coli or mammalian cells (e.g. Chinese hamster ovary cell culture or other protein expression systems) of DNA encoding the fragment. Antibody fragments can be obtained by pepsin or papain digestion of whole antibodies by conventional methods. For example, antibody fragments can be produced by enzymatic cleavage of antibodies with pepsin to provide a 5S fragment denoted F(ab′)2. This fragment can be further cleaved using a thiol reducing agent, and optionally a blocking group for the sulfhydryl groups resulting from cleavage of disulfide linkages, to produce 3.5S Fab′ monovalent fragments. Alternatively, an enzymatic cleavage using pepsin produces two monovalent Fab′ fragments and an Fc fragment directly. These methods are described, for example, by Goldenberg, U.S. Pat. Nos. 4,036,945 and 4,331,647, and references contained therein, which patents are hereby incorporated by reference in their entirety. See also Porter, R. R. [Biochem. J. 73: 119-126 (1959)]. Other methods of cleaving antibodies, such as separation of heavy chains to form monovalent light-heavy chain fragments, further cleavage of fragments, or other enzymatic, chemical, or genetic techniques may also be used, so long as the fragments bind to the antigen that is recognized by the intact antibody.

[0152] Fv fragments comprise an association of VH and VL chains. This association may be noncovalent, as described in Inbar et al. [Proc. Nat'l Acad. Sci. USA 69:2659-62 (19720]. Alternatively, the variable chains can be linked by an intermolecular disulfide bond or cross-linked by chemicals such as glutaraldehyde. Preferably, the Fv fragments comprise VH and VL chains connected by a peptide linker. These single-chain antigen binding proteins (sFv) are prepared by constructing a structural gene comprising DNA sequences encoding the VH and VL domains connected by an oligonucleotide. The structural gene is inserted into an expression, vector, which is subsequently introduced into a host cell such as E. coli. The recombinant host cells synthesize a single polypeptide chain with a linker peptide bridging the two V domains. Methods for producing sFvs are described, for example, by [Whitlow and Filpula, Methods 2: 97-105 (1991); Bird et al., Science 242:423-426 (1988); Pack et al., Bio/Technology 11:1271-77 (1993); and U.S. Pat. No. 4,946,778, which is hereby incorporated by reference in its entirety.

[0153] Another form of an antibody fragment is a peptide coding for a single complementarity-determining region (CDR). CDR peptides (“minimal recognition units”) can be obtained by constructing genes encoding the CDR of an antibody of interest. Such genes are prepared, for example, by using the polymerase chain reaction to synthesize the variable region from RNA of antibody-producing cells. See, for example, Larrick and Fry [Methods, 2: 106-10 (1991)].

[0154] Humanized forms of non-human (e.g., murine) antibodies are chimeric molecules of immunoglobulins, immunoglobulin chains or fragments thereof (such as Fv, Fab, Fab′, F(ab′) or other antigen-binding subsequences of antibodies) which contain minimal sequence derived from non-human immunoglobulin. Humanized antibodies include human immunoglobulins (recipient antibody) in which residues from a complementary determining region (CDR) of the recipient are replaced by residues from a CDR of a non-human species (donor antibody) such as mouse, rat or rabbit having the desired specificity, affinity and capacity. In some instances, Fv framework residues of the human immunoglobulin are replaced by corresponding non-human residues. Humanized antibodies may also comprise residues which are found neither in the recipient antibody nor in the imported CDR or framework sequences. In general, the humanized antibody will comprise substantially all of at least one, and typically two, variable domains, in which all or substantially all of the CDR regions correspond to those of a non-human immunoglobulin and all or substantially all of the FR regions are those of a human immunoglobulin consensus sequence. The humanized antibody optimally also will comprise at least a portion of an immunoglobulin constant region (Fc), typically that of a human immunoglobulin [Jones et al., Nature, 321:522-525 (1986); Riechmann et al., Nature, 332:323-329 (1988); and Presta, Curr. Op. Struct. Biol., 2:593-596 (1992)].

[0155] Methods for humanizing non-human antibodies are well known in the art. Generally, a humanized antibody has one or more amino acid residues introduced into it from a source which is non-human. These non-human amino acid residues are often referred to as import residues, which are typically taken from an import variable domain. Humanization can be essentially performed following the method of Winter and co-workers [Jones et al., Nature, 321:522-525 (1986); Riechmann et al., Nature 332:323-327 (1988); Verhoeyen et al., Science, 239:1534-1536 (1988)], by substituting rodent CDRs or CDR sequences for the corresponding sequences of a human antibody. Accordingly, such humanized antibodies are chimeric antibodies (U.S. Pat. No. 4,816,567), wherein substantially less than an intact human variable domain has been substituted by the corresponding sequence from a non-human species. In practice, humanized antibodies are typically human antibodies in which some CDR residues and possibly some FR residues are substituted by residues from analogous sites in rodent antibodies.

[0156] Human antibodies can also be produced using various techniques known in the art, including phage display libraries [Hoogenboom and Winter, J. Mol. Biol., 227:381 (1991); Marks et al., J. Mol. Biol., 222:581 (1991)]. The techniques of Cole et al. and Boerner et al. are also available for the preparation of human monoclonal antibodies (Cole et al., Monoclonal Antibodies and Cancer Therapy, Alan R. Liss, p. 77 (1985) and Boerner et al., J. Immunol., 147(1):86-95 (1991)]. Similarly, human antibodies can be made by introduction of human immunoglobulin loci into transgenic animals, e.g., mice in which the endogenous immunoglobulin genes have been partially or completely inactivated. Upon challenge, human antibody production is observed, which closely resembles that seen in humans in all respects, including gene rearrangement, assembly, and antibody repertoire. This approach is described, for example, in U.S. Pat. Nos. 5,545,807; 5,545,806; 5,569,825; 5,625,126; 5,633,425; 5,661,016, and in the following scientific publications: Marks et al., Bio/Technology 10:779-783 (1992); Lonberg et al., Nature 368: 856-859 (1994); Morrison, Nature 368 812-13 (1994); Fishwild et al., Nature Biotechnology 14, 845-51 (1996); Neuberger, Nature Biotechnology 14: 826 (1996); and Lonberg and Huszar, Intern. Rev. Immunol. 13, 65-93 (1995).

[0157] Preferably, the antibody of this aspect of the present invention specifically binds at least one epitope of the polypeptide variants of the present invention. As used herein, the term “epitope” refers to any antigenic determinant on an antigen to which the paratope of an antibody binds.

[0158] Epitopic determinants usually consist of chemically active surface groupings of molecules such as amino acids or carbohydrate side chains and usually have specific three dimensional structural characteristics, as well as specific charge characteristics.

[0159] Optionally, a unique epitope may be created in a variant due to a change in one or more post-translational modifications, including but not limited to glycosylation and/or phosphorylation, as described below. Such a change may also cause a new epitope to be created, for example through removal of glycosylation at a particular site.

[0160] An epitope according to the present invention may also optionally comprise part or all of a unique sequence portion of a variant according to the present invention in combination with at least one other portion of the variant which is not contiguous to the unique sequence portion in the linear polypeptide itself, yet which are able to form an epitope in combination. One or more unique sequence portions may optionally combine with one or more other non-contiguous portions of the variant (including a portion which may have high homology to a portion of the known protein) to form an epitope.

[0161] Display Libraries

[0162] According to still another aspect of the present invention there is provided a display library comprising a plurality of display vehicles (such as phages, viruses or bacteria) each displaying at least 6, at least 7, at least 8, at least 9, at least 10, 10-15, 12-17, 15-20, 15-30 or 20-50 consecutive amino acids derived from the polypeptide sequences of the present invention.

[0163] Since in therapeutic applications it is highly desirable to employ the minimal and most efficacious polypeptide regions, which still exert therapeutic function, identification of such peptide regions can be effected using various approaches, including, for example, display techniques as described herein.

[0164] Methods of constructing such display libraries are well known in the art. Such methods are described in, for example, Young A C, et al., “The three-dimensional structures of a polysaccharide binding antibody to Cryptococcus neoformans and its complex with a peptide from a phage display library: implications for the identification of peptide mimotopes” J Mol Biol 1997 Dec. 12; 274(4):622-34; Giebel L B et al. “Screening of cyclic peptide phage libraries identifies ligands that bind streptavidin with high affinities” Biochemistry 1995 Nov. 28; 34(47):15430-5; Davies E L et al., “Selection of specific phage-display antibodies using libraries derived from chicken immunoglobulin genes” J Immunol Methods 1995 Oct. 12; 186(1):125-35; Jones C R T al. “Current trends in molecular recognition and bioseparation” J Chromatogr A 1995 Jul. 14; 707(1):3-22; Deng S J et al. “Basis for selection of improved carbohydrate-binding single-chain antibodies from synthetic gene libraries” Proc Natl Acad Sci USA 1995 May 23; 92(11):4992-6; and Deng S J et al. “Selection of antibody single-chain variable fragments with improved carbohydrate binding by phage display” J Biol Chem 1994 Apr. 1; 269(13):9533-8, which are incorporated herein by reference.

[0165] A brief description of different alpha 1 subunit types is now provided. These subunits are named as follows: alpha IX, in which the letter “X” is replaced by A, B, C, D, E, F, G, H, I or S. These different subunits cause the assembled calcium channel to have different functions. Furthermore, these subunits are expressed in particular tissues, which also affects their resultant function. The resultant channels are named as follows: CavX.Y, in which “X.Y” is a number indicating their function (1.1, 1.2, 1.3 and 1.4 are all L-type channels, 3.1, 3.2 and 3.3 are all T-type channels and the rest 2.1, 2.2, 2.3 are P/Q, N, R-type channels).

### EXAMPLE 1

[0166] This Example relates to the variant Z39724_P4 (SEQ ID NO:16; nucleic acid sequence is given by SEQ ID NO:38), which is a variant alpha 1 subunit according to the present invention, and more specifically, is a splice variant of the known protein CCAE_HUMAN (all known proteins are referred to herein according to their SwissProt accession number), which is the voltage-dependent R-type calcium channel alpha-1E subunit, also known as the voltage-gated calcium channel alpha subunit Cav2.3. This protein is encoded by the gene CACNA1E. The alpha-1E form of the alpha 1 subunit results in formation of R-type calcium channels, which belong to the “high-voltage activated” (HVA) group and are blocked completely by nickel, and partially by omega-agatoxin-IIIA (omega-Aga-IIIA). These channels are however insensitive to dihydropyridines, for example, as well as to various other toxins. Calcium channels containing the alpha-1E subunit could be involved in the modulation of firing patterns of neurons, which is clearly important for thought processes. The tissue specificity is believed to be in neuronal tissues and in kidney.

[0167] The structure of this alpha1 subunit is as follows. Each of the four internal repeats contains five hydrophobic transmembrane segments (S1, S2, S3, S5, S6) and one positively charged transmembrane segment (S4). S4 segments probably represent the voltage-sensor and are characterized by a series of positively charged amino acids at every third position.

[0168] The structure of the splice variant according to the present invention features a unique head and a unique tail, as well as an internal skipped exon, as compared to the known protein sequence. An alignment is provided at the end of this section, while the comparison between the two sequences is described below.

[0169] According to preferred embodiments of the present invention, there is provided an isolated chimeric polypeptide encoding for Z39724_P4, comprising a first amino acid sequence being at least 70%, optionally at least 80%, preferably at least 85%, more preferably at least 90% and most preferably at least 95% homologous to a polypeptide having the sequence (SEQ ID NO: 45) MRGLSPDRRLPEPAPCPAAGSPEPRSAGRRQRHVLALPEEEAWRPQQCALLEADASDEVGMLPASPRAASGFDNFFQVQEGEGQGWEGAMALEAGSSPFLPVSPEVMKRRRGGLIEQRDIIKAHEAHKMQSTPQARRKEWE corresponding to amino acids 1-141 of Z39724_P4, a second amino acid sequence being at least 90% homologous to (SEQ ID NO: 46) MARFGEAVVARPGSGDGDSDQSRNRQGTPVPASGQAAAYKQTKAQRARTMALYNPIPVRQNCFTVNRSLFIFGEDNIVRKYAKKLIDWPPFEYMILATIIANCIVLALEQHLPEDDKTPMSRRLEKTEPYFIGIFCFEAGIKIVALGFIFHKGSYLRNGWNVMDFIVVLSGILATAGTHFNTHVDLRTLRAVRVLRPLKLVSGIPSLQIVLKSIMKAMVPLLQIGLLLFFAILMFAIIGLEFYSGKLHRACFMNNSGILEGFDPPHPCGVQGCPAGYECKDWIGPNDGITQFDNILFAVLTVFQCITMEGWTTVLYNTNDALGATWNWLYFIPLIIIGSFFVLNLVLGVLSGEFAKERERVENRRAFMKLRRQQQIERELNGYRAWIDKAEEVMLAEENKNAGTSALEVLRRATIKRSRTEAMTRDSSDEHCVDISSVGTPLARASIKSAKVDGVSYFRHKERLLRISIRHMVKSQVFYWIVLSLVALNTACVAIVHHNQPQWLTHLLYYAEFLFLGLFLLEMSLKMYGMGPRLYFHSSFNCFDFGVTVGSIFEVVWAIFRPGTSFGISVLRALRLLRIFKITKYWASLRNLVVSLMSSMKSIISLLFLLFLFIVVFALLGMQLFGGRFNFNDGTPSANFDTFPAAI corresponding to amino acids 1-647 of CCAE_HUMAN, which also corresponds to amino acids 142-788 of Z39724_P4, a bridging amino acid M corresponding to amino acid 789 of Z39724_P4, a third amino acid sequence being at least 90% homologous to (SEQ ID NO: 47) TVFQILTGEDWNEVMYNGIRSQGGVSSGMWSAIYFIVLTLFGNYTLLNVFLAIAVDNLANAQELTKDEQEEEEAFNQKHALQKAKEVSPMSAPNMPSIE corresponding to amino acids 649-747 of CCAE_HUMAN, which also corresponds to amino acids 790-888 of Z39724_P4, a fourth amino acid sequence being at least 90% homologous to (SEQ ID NO: 48) RERRRRHHMSVWEQRTSQLRKHMQMSSQEALNREEAPTMNPLNPLNPLSSLNPLNAHPSLYRRPRAIEG corresponding to amino acids 767-835 of CCAE_HUMAN, which also corresponds to amino acids 889-957 of Z39724_P4, a unique insertion (fifth amino acid sequence) being at least 70%, optionally at least 80%, preferably at least 85%, more preferably at least 90% and most preferably at least 95% homologous to a polypeptide having the sequence LAL corresponding to amino acids 958-960 of Z39724_P4, a sixth amino acid sequence being at least 90% homologous to (SEQ ID NO: 49) GLALEKFEEERISRGGSLKGDGGDRSSALDNQRTPLSLGQREPPWLARPCHGNCDPTQQEAGGGEAVVTFEDRARHRQSQRRSRHRRVRTEGKESSSASRSRSASQERSLDEAMPTEGEKDHELRGNHGAKEPTIQEERAQDLRRTNSLMVSRGSGLAGGLDEADTPLVLPHPELEVGKHVVLTEQEPEGSSEQALLGNVQLDMGRVISQSEPDLSCITANTDKATTESTSVTVAIPDVDPLVDSTVVHISNKTDGEASPLKEAEIREDEEEVEKKKQKKEKRETGKAMVPHSSMFIFSTTNPIRRACHYIVNLRYFEMCILLVIAASSIALAAEDPVLTNSERNKVLRYFDYVFTGVFTFEMVIKMIDQGLILQDGSYFRDLWNILDFVVVVGALVAFALANALGTNKGRDIKTIKSLRVLRVLRPLKTIKRLPKLKAVFDCVVTSLKNVFNILIVYKLFMFIFAVIAVQLFKGKFFYCTDSSKDTEKECIGNYVDHEKNKMEVKGREWKRHEFHYDNIIWALLTLFTVSTGEGWPQVLQHSVDVTEEDRGPSRSNRMEMSIFYVVYFVVFPFFFVNIFVALIIITFQEQGDKMMEECSLEKNERACIDFAISAKPLTRYMPQNRHTFQYRVWHFVVSPSFEYTIMAMIALNTVVLMMKYYSAPCTYELALKYLNIAFTMVFSLECVLKVIAFGFLNYFRDTWNIFDFITVIGSITEIILTDSKLVNTSGFNMSFLKLFRAARLIKLLRQGYTIRILLWTFVQSFKALPYVCLLIAMLFFIYAIIGMQVFGNIKLDEESHINRHNNFRSFFGSLMLLFRSATGEAWQEIMLSCLGEKGCEPDTTAPSGQNENERCGTDLAYVYFVSFIFFCSFLMLNLFVAVIMDNFEYLTRDSSILGPHHLDEFVRVWAEYDRAA corresponding to amino acids 838-1754 of CCAE_HUMAN, which also corresponds to amino acids 961-1877 of Z39724_P4, and a seventh amino acid sequence being at least 70%, optionally at least 80%, preferably at least 85%, more preferably at least 90% and most preferably at least 95% homologous to a polypeptide having the sequence (SEQ ID NO: 50) WCVGPSAAPAGPRAKVSGVPREEAGIGATQMPACYRRKGDSS corresponding to amino acids 1878-1919 of Z39724_P4, wherein said first amino acid sequence, second amino acid sequence, bridging amino acid, third amino acid sequence, fourth amino acid sequence, fifth amino acid sequence, sixth amino acid sequence and seventh amino acid sequence are contiguous and in a sequential order.

[0170] According to other preferred embodiments of the present invention, there is provided an isolated polypeptide encoding for a head of Z39724_P4, comprising a polypeptide being at least 70%, optionally at least about 80%, preferably at least about 85%, more preferably at least about 90% and most preferably at least about 95% homologous to the sequence (SEQ ID NO: 51) MRGLSPDRRLPEPAPCPAAGSPEPRSAGRRQRHVLALPEEEAWRPQQCALLEADASDEVGMLPASPRAASGFDNFFQVQEGEGQGWEGAMALEAGSSPFLPVSPEVMKRRRGGLIEQRDIIKAHEAHKMQSTPQARRKEWE of Z39724_P4.

[0171] According to other preferred embodiments of the present invention, there is provided an isolated chimeric polypeptide encoding for an edge portion of Z39724_P4, comprising a polypeptide having a length “n”, wherein n is at least about 10 amino acids in length, optionally at least about 20 amino acids in length, preferably at least about 30 amino acids in length, more preferably at least about 40 amino acids in length and most preferably at least about 50 amino acids in length, wherein at least two amino acids comprise ER, having a structure as follows: a sequence starting from any of amino acid numbers 888−x to 889; and ending at any of amino acid numbers 889+((n−2)−x), in which x varies from 0 to n−2.

[0172] According to other preferred embodiments of the present invention, there is provided an isolated polypeptide encoding for an edge portion of Z39724_P4, comprising an amino acid sequence being at least 70%, optionally at least about 80%, preferably at least about 85%, more preferably at least about 90% and most preferably at least about 95% homologous to the sequence encoding for LAL, corresponding to Z39724_P4.

[0173] According to other preferred embodiments of the present invention, there is provided an isolated polypeptide encoding for a tail of Z39724_P4, comprising a polypeptide being at least 70%, optionally at least about 80%, preferably at least about 85%, more preferably at least about 90% and most preferably at least about 95% homologous to the sequence (SEQ ID NO: 52) WCVGPSAAPAGPRAKVSGVPREEAGIGATQMPACYRRKGDSS in Z39724_P4.

[0174] Domains affected by alternative splicing of this variant, as can be seen from the comparison above, include the cytoplasmic loop between domain II and domain III, and the cytoplasmic C-terminus region of the protein.

[0175] Without wishing to be limited by a single hypothesis, there are a number of possible changes in the function of the channel resulting from the alternative splicing of the variant. The intracellular loop connecting domains II and III mediates interaction with effector proteins such as the calcium release channel for skeletal muscle excitation-contraction coupling, synaptic proteins such as syntaxin and SNAP25 (soluble attachment proteins of NSF-N-ethylmaleimide-sensitive fusion protein) or proteins for neuronal excitation-exocytosis coupling. Therefore changes to (or the absence of) these regions would be expected to affect interactions with such effector proteins and hence overall calcium channel function.

[0176] Changes in the loop between domains II and III are known to result in functional effects on R— type alpha-1E proteins. For example, in R-type Cav2.3 channels, exon 19 can be spliced out, which results in the absence of calcium-dependent slowing of inactivation and acceleration of recovery from inactivation. The resultant calcium channel has decreased inactivation by calcium influx, and has been found to be abundant in murine cerebellum, the islets of Langerhans and kidney.

[0177] The C-terminus forms a large portion (about one third) of the alpha 1 subunit and varies significantly in the CACNA1 gene family, indicating that it may be important to differential function of calcium channels. It is encoded by 3-14 exons, and the protein contains several regulatory elements such as binding sites for calcium, calmodulin and G-proteins. In Cav2.2 channels, the C-terminus is important for targeting the channels to synapses. Mutations in this region have been shown to be responsible for diseases such as spinocerebellar atxia type 6 (described in greater detail above). At least two different C-terminal motifs, having different lengths, have been found in different alpha 1 subunits. These motifs may be generated through the formation of different splice variants. For example, the P/Q Cav2.1 isoforms are generated by alternative splice donor sites at the 5′ end of exon 47, causing a stop codon to form and the protein to be truncated. An alternative donor site results in insertion of five bases leading to a frame shift and an elongation of the C-terminus by 244 amino acids.

[0178] In all three types of Cav2 channels, there are one to two exons coding for distal parts of the C-terminus that may potentially be spliced out (exons 43 and 44 in P/Q-type Cav2.1, exon 46 in the N-type Cav2.2, and exon 45 in R-type Cav2.3). Generally, the shorter the C-terminus becomes, the greater the current amplitude and the stronger the calcium dependence of inactivation, such that calcium influx causes the channel to deactivate more quickly. The reduction of current amplitude seen with these splice variants may be due to regulatory effects, such as mRNA destabilization or reduction of targeting to the membrane. On the other hand, it has been hypothesized that because the C-terminus mobility may contribute to removing the calcium-calmodulin complex from the inner mouth of the pore, a shorter C-terminus may contribute to this mobility and accelerate inactivation (Kobrinsky et al. 2003).

[0179] From the above description of the effect of changes to the C-terminus domain of this variant, it is expected that the variant will have greater current amplitude from the WT and a stronger calcium dependence of inactivation from the WT. In addition, the changes in the cytoplasmic loop between domain II and domain III might result in the absence of calcium-dependent slowing of inactivation and acceleration of recovery from inactivation.

Sequence name: CCAE_HUMAN

documentation:

of: Z39724_P4 (resides 142-1877 of SEQ ID NO: 16)_x

CCAE_HUMAN (SEQ ID NO: 53). . .

segment 1/1:

[0180] Quality: 16713.00

Escore: 0

Matching length: 1735 Total

length: 1755

Matching Percent Similarity: 99.88 Matching Percent

Identity: 99.83

Total Percent Similarity: 98.75 Total Percent

Identity: 98.69

[0181] Gaps: 2

| | . . . . . | |
|---|---|---|
| 142 | MARFGEAVVARPGSGDGDSDQSRNRQGTPVPASGQAAAYKQTKAQRARTM | 191 |
| | \|\|\|\|\|\|\|\|\|\|\|\|\|\|\|\|\|\|\|\|\|\|\|\|\|\|\|\|\|\|\|\|\|\|\|\|\|\|\|\|\|\|\|\|\|\|\|\|\|\| | |
| 1 | MARFGEAVVARPGSGDGDSDQSRNRQGTPVPASGQAAAYKQTKAQRARTM | 50 |
| | . . . . . | |
| 192 | ALYNPIPVRQNCFTVNRSLFIFGEDNIVRKYAKKLIDWPPFEYMILATII | 241 |
| | \|\|\|\|\|\|\|\|\|\|\|\|\|\|\|\|\|\|\|\|\|\|\|\|\|\|\|\|\|\|\|\|\|\|\|\|\|\|\|\|\|\|\|\|\|\|\|\|\|\| | |
| 51 | ALYNPIPVRQNCFTVNRSLFIFGEDNIVRKYAKKLIDWPPFEYMILATII | 100 |
| | . . . . . | |
| 242 | ANCIVLALEQHLPEDDKTPMSRRLEKTEPYFIGIFCFEAGIKIVALGFIF | 291 |
| | \|\|\|\|\|\|\|\|\|\|\|\|\|\|\|\|\|\|\|\|\|\|\|\|\|\|\|\|\|\|\|\|\|\|\|\|\|\|\|\|\|\|\|\|\|\|\|\|\|\| | |
| 101 | ANCIVLALEQHLPEDDKTPMSRRLEKTEPYFIGIFCFEAGIKIVALGFIF | 150 |
| | . . . . . | |
| 292 | HKGSYLRNGWNVMDFIVVLSGILATAGTHFNTHVDLRTLRAVRVLRPLKL | 341 |
| | \|\|\|\|\|\|\|\|\|\|\|\|\|\|\|\|\|\|\|\|\|\|\|\|\|\|\|\|\|\|\|\|\|\|\|\|\|\|\|\|\|\|\|\|\|\|\|\|\|\| | |
| 151 | HKGSYLRNGWNVMDFIVVLSGILATAGTHFNTHVDLRTLRAVRVLRPLKL | 200 |
| | . . . . . | |
| 342 | VSGIPSLQIVLKSIMKAMVPLLQIGLLLFFAILMFAIIGLEFYSGKLHRA | 391 |
| | \|\|\|\|\|\|\|\|\|\|\|\|\|\|\|\|\|\|\|\|\|\|\|\|\|\|\|\|\|\|\|\|\|\|\|\|\|\|\|\|\|\|\|\|\|\|\|\|\|\| | |
| 201 | VSGIPSLQIVLKSIMKAMVPLLQIGLLLFFAILMFAIIGLEFYSGKLHRA | 250 |
| | . . . . . | |
| 392 | CFMNNSGILEGFDPPHPCGVQGCPAGYECKDWIGPNDGITQFDNILFAVL | 441 |
| | \|\|\|\|\|\|\|\|\|\|\|\|\|\|\|\|\|\|\|\|\|\|\|\|\|\|\|\|\|\|\|\|\|\|\|\|\|\|\|\|\|\|\|\|\|\|\|\|\|\| | |
| 251 | CFMNNSGILEGFDPPHPCGVQGCPAGYECKDWIGPNDGITQFDNILFAVL | 300 |
| | . . . . . | |
| 442 | TVFQCITMEGWTTVLYNTNDALGATWNWLYFIPLIIIGSFFVLNLVLGVL | 491 |
| | \|\|\|\|\|\|\|\|\|\|\|\|\|\|\|\|\|\|\|\|\|\|\|\|\|\|\|\|\|\|\|\|\|\|\|\|\|\|\|\|\|\|\|\|\|\|\|\|\|\| | |
| 301 | TVFQCITMEGWTTVLYNTNDALGATWNWLYFIPLIIIGSFFVLNLVLGVL | 350 |
| | . . . . . | |
| 492 | SGEFAKERERVENRRAFMKLRRQQQIERELNGYRAWIDKAEEVMLAEENK | 541 |
| | \|\|\|\|\|\|\|\|\|\|\|\|\|\|\|\|\|\|\|\|\|\|\|\|\|\|\|\|\|\|\|\|\|\|\|\|\|\|\|\|\|\|\|\|\|\|\|\|\|\| | |
| 351 | SGEFAKERERVENRRAFMKLRRQQQIERELNGYRAWIDKAEEVMLAEENK | 400 |
| | . . . . . | |
| 542 | NAGTSALEVLRRATIKRSRTEAMTRDSSDEHCVDISSVGTPLARASIKSA | 591 |
| | \|\|\|\|\|\|\|\|\|\|\|\|\|\|\|\|\|\|\|\|\|\|\|\|\|\|\|\|\|\|\|\|\|\|\|\|\|\|\|\|\|\|\|\|\|\|\|\|\|\| | |
| 401 | NAGTSALEVLRRATIKRSRTEAMTRDSSDEHCVDISSVGTPLARASIKSA | 450 |
| | . . . . . | |
| 592 | KVDGVSYFRHKERLLRISIRHMVKSQVFYWIVLSLVALNTACVAIVHHNQ | 641 |
| | \|\|\|\|\|\|\|\|\|\|\|\|\|\|\|\|\|\|\|\|\|\|\|\|\|\|\|\|\|\|\|\|\|\|\|\|\|\|\|\|\|\|\|\|\|\|\|\|\|\| | |
| 451 | KVDGVSYFRHKERLLRISIRHMVKSQVFYWIVLSLVALNTACVAIVHHNQ | 500 |
| | . . . . . | |
| 642 | PQWLTHLLYYAEFLFLGLFLLEMSLKMYGMGPRLYFHSSFNCFDFGVTVG | 691 |
| | \|\|\|\|\|\|\|\|\|\|\|\|\|\|\|\|\|\|\|\|\|\|\|\|\|\|\|\|\|\|\|\|\|\|\|\|\|\|\|\|\|\|\|\|\|\|\|\|\|\| | |
| 501 | PQWLTHLLYYAEFLFLGLFLLEMSLKMYGMGPRLYFHSSFNCFDFGVTVG | 550 |
| | . . . . . | |
| 692 | SIFEVVWAIFRPGTSFGISVLRALRLLRIFKITKYWASLRNLVVSLMSSM | 741 |
| | \|\|\|\|\|\|\|\|\|\|\|\|\|\|\|\|\|\|\|\|\|\|\|\|\|\|\|\|\|\|\|\|\|\|\|\|\|\|\|\|\|\|\|\|\|\|\|\|\|\| | |
| 551 | SIFEVVWAIFRPGTSFGISVLRALRLLRIFKITKYWASLRNLVVSLMSSM | 600 |
| | . . . . . | |
| 742 | KSIISLLFLLFLFIVVFALLGMQLFGGRFNFNDGTPSANFDTFPAAIMTV | 791 |
| | \|\|\|\|\|\|\|\|\|\|\|\|\|\|\|\|\|\|\|\|\|\|\|\|\|\|\|\|\|\|\|\|\|\|\|\|\|\|\|\|\|\|\|\|\|\|\|\|\|\| | |
| 601 | KSIISLLFLLFLFIVVFALLGMQLFGGRFNFNDGTPSANFDTFPAAIMTV | 650 |
| | . . . . . | |
| 792 | FQILTGEDWNEVMYNGIRSQGGVSSGMWSAIYFIVLTLFGNYTLLNVFLA | 841 |
| | \|\|\|\|\|\|\|\|\|\|\|\|\|\|\|\|\|\|\|\|\|\|\|\|\|\|\|\|\|\|\|\|\|\|\|\|\|\|\|\|\|\|\|\|\|\|\|\|\|\| | |
| 651 | FQILTGEDWNEVMYNGIRSQGGVSSGMWSAIYFIVLTLFGNYTLLNVFLA | 700 |
| | . . . . . | |
| 842 | IAVDNLANAQELTKDEQEEEEAFNQKHALQKAKEVSPMSAPNMPSIE... | 888 |
| | \|\|\|\|\|\|\|\|\|\|\|\|\|\|\|\|\|\|\|\|\|\|\|\|\|\|\|\|\|\|\|\|\|\|\|\|\|\|\|\|\|\|\|\|\|\|\| | |
| 701 | IAVDNLANAQELTKDEQEEEEAFNQKHALQKAKEVSPMSAPNMPSIERDR | 750 |
| | . . . . . | |
| 889 | ................RERRRRHHMSVWEQRTSQLRKHMQMSSQEALNRE | 922 |
| | \|\|\|\|\|\|\|\|\|\|\|\|\|\|\|\|\|\|\|\|\|\|\|\|\|\|\|\|\|\|\|\|\|\| | |
| 751 | RRRHHMSMWEPRSSHLRERRRRHHMSVWEQRTSQLRKHMQMSSQEALNRE | 800 |
| | . . . . . | |
| 923 | EAPTMNPLNPLNPLSSLNPLNAHPSLYRRPRAIEGLALGLALEKFEEERI | 972 |
| | \|\|\|\|\|\|\|\|\|\|\|\|\|\|\|\|\|\|\|\|\|\|\|\|\|\|\|\|\|\|\|\|\|\|\|\|\|\|\|\|\|\|\|\|\|\|\|\|\|\| | |
| 801 | EAPTMNPLNPLNPLSSLNPLNAHPSLYRRPRAIEGLALGLALEKFEEERI | 849 |
| | . . . . . | |
| 973 | SRGGSLKGDGGDRSSALDNQRTPLSLGQREPPWLARPCHGNCDPTQQEAG | 1022 |
| | \|\|\|\|\|\|\|\|\|\|\|\|\|\|\|\|\|\|\|\|\|\|\|\|\|\|\|\|\|\|\|\|\|\|\|\|\|\|\|\|\|\|\|\|\|\|\|\|\|\| | |
| 850 | SRGGSLKGDGGDRSSALDNQRTPLSLGQREPPWLARPCHGNCDPTQQEAG | 899 |
| | . . . . . | |
| 1023 | GGEAVVTFEDRARHRQSQRRSRHRRVRTEGKESSSASRSRSASQERSLDE | 1072 |
| | \|\|\|\|\|\|\|\|\|\|\|\|\|\|\|\|\|\|\|\|\|\|\|\|\|\|\|\|\|\|\|\|\|\|\|\|\|\|\|\|\|\|\|\|\|\|\|\|\|\| | |
| 900 | GGEAVVTFEDRARHRQSQRRSRHRRVRTEGKESSSASRSRSASQERSLDE | 949 |
| | . . . . . | |
| 1073 | AMPTEGEKDHELRGNHGAKEPTIQEERAQDLRRTNSLMVSRGSGLAGGLD | 1122 |
| | \|\|\|\|\|\|\|\|\|\|\|\|\|\|\|\|\|\|\|\|\|\|\|\|\|\|\|\|\|\|\|\|\|\|\|\|\|\|\|\|\|\|\|\|\|\|\|\|\|\| | |
| 950 | AMPTEGEKDHELRGNHGAKEPTIQEERAQDLRRTNSLMVSRGSGLAGGLD | 999 |
| | . . . . . | |
| 1123 | EADTPLVLPHPELEVGKHVVLTEQEPEGSSEQALLGNVQLDMGRVISQSE | 1172 |
| | \|\|\|\|\|\|\|\|\|\|\|\|\|\|\|\|\|\|\|\|\|\|\|\|\|\|\|\|\|\|\|\|\|\|\|\|\|\|\|\|\|\|\|\|\|\|\|\|\|\| | |
| 1000 | EADTPLVLPHPELEVGKHVVLTEQEPEGSSEQALLGNVQLDMGRVISQSE | 1049 |
| | . . . . . | |
| 1173 | PDLSCITANTDKATTESTSVTVAIPDVDPLVDSTVVHISNKTDGEASPLK | 1222 |
| | \|\|\|\|\|\|\|\|\|\|\|\|\|\|\|\|\|\|\|\|\|\|\|\|\|\|\|\|\|\|\|\|\|\|\|\|\|\|\|\|\|\|\|\|\|\|\|\|\|\| | |
| 1050 | PDLSCITANTDKATTESTSVTVAIPDVDPLVDSTVVHISNKTDGEASPLK | 1099 |
| | . . . . . | |
| 1223 | EAEIREDEEEVEKKKQKKEKRETGKAMVPHSSMFIFSTTNPIRRACHYIV | 1272 |
| | \|\|\|\|\|\|\|\|\|\|\|\|\|\|\|\|\|\|\|\|\|\|\|\|\|\|\|\|\|\|\|\|\|\|\|\|\|\|\|\|\|\|\|\|\|\|\|\|\|\| | |
| 1100 | EAEIREDEEEVEKKKQKKEKRETGKAMVPHSSMFIFSTTNPIRRACHYIV | 1149 |
| | . . . . . | |
| 1273 | NLRYFEMCILLVIAASSIALAAEDPVLTNSERNKVLRYFDYVFTGVFTFE | 1322 |
| | \|\|\|\|\|\|\|\|\|\|\|\|\|\|\|\|\|\|\|\|\|\|\|\|\|\|\|\|\|\|\|\|\|\|\|\|\|\|\|\|\|\|\|\|\|\|\|\|\|\| | |
| 1150 | NLRYFEMCILLVIAASSIALAAEDPVLTNSERNKVLRYFDYVFTGVFTFE | 1199 |
| | . . . . . | |
| 1323 | MVIKMIDQGLILQDGSYFRDLWNILDFVVVVGALVAFALANALGTNKGRD | 1372 |
| | \|\|\|\|\|\|\|\|\|\|\|\|\|\|\|\|\|\|\|\|\|\|\|\|\|\|\|\|\|\|\|\|\|\|\|\|\|\|\|\|\|\|\|\|\|\|\|\|\|\| | |
| 1200 | MVIKMIDQGLILQDGSYFRDLWNILDFVVVVGALVAFALANALGTNKGRD | 1249 |
| | . . . . . | |
| 1373 | IKTIKSLRVLRVLRPLKTIKRLPKLKAVFDCVVTSLKNVFNILIVYKLFM | 1422 |
| | \|\|\|\|\|\|\|\|\|\|\|\|\|\|\|\|\|\|\|\|\|\|\|\|\|\|\|\|\|\|\|\|\|\|\|\|\|\|\|\|\|\|\|\|\|\|\|\|\|\| | |
| 1250 | IKTIKSLRVLRVLRPLKTIKRLPKLKAVFDCVVTSLKNVFNILIVYKLFM | 1299 |
| | . . . . . | |
| 1423 | FIFAVIAVQLFKGKFFYCTDSSKDTEKECIGNYVDHEKNKMEVKGREWKR | 1472 |
| | \|\|\|\|\|\|\|\|\|\|\|\|\|\|\|\|\|\|\|\|\|\|\|\|\|\|\|\|\|\|\|\|\|\|\|\|\|\|\|\|\|\|\|\|\|\|\|\|\|\| | |
| 1300 | FIFAVIAVQLFKGKFFYCTDSSKDTEKECIGNYVDHEKNKMEVKGREWKR | 1349 |
| | . . . . . | |
| 1473 | HEFHYDNIIWALLTLFTVSTGEGWPQVLQHSVDVTEEDRGPSRSNRMEMS | 1522 |
| | \|\|\|\|\|\|\|\|\|\|\|\|\|\|\|\|\|\|\|\|\|\|\|\|\|\|\|\|\|\|\|\|\|\|\|\|\|\|\|\|\|\|\|\|\|\|\|\|\|\| | |
| 1350 | HEFHYDNIIWALLTLFTVSTGEGWPQVLQHSVDVTEEDRGPSRSNRMEMS | 1399 |
| | . . . . . | |
| 1523 | IFYVVYFVVFPFFFVNIFVALIIITFQEQGDKMMEECSLEKNERACIDFA | 1572 |
| | \|\|\|\|\|\|\|\|\|\|\|\|\|\|\|\|\|\|\|\|\|\|\|\|\|\|\|\|\|\|\|\|\|\|\|\|\|\|\|\|\|\|\|\|\|\|\|\|\|\| | |
| 1400 | IFYVVYFVVFPFFFVNIFVALIIITFQEQGDKMMEECSLEKNERACIDFA | 1449 |
| | . . . . . | |
| 1573 | ISAKPLTRYMPQNRHTFQYRVWHFVVSPSFEYTIMAMIALNTVVLMMKYY | 1622 |
| | \|\|\|\|\|\|\|\|\|\|\|\|\|\|\|\|\|\|\|\|\|\|\|\|\|\|\|\|\|\|\|\|\|\|\|\|\|\|\|\|\|\|\|\|\|\|\|\|\|\| | |
| 1450 | ISAKPLTRYMPQNRHTFQYRVWHFVVSPSFEYTIMAMIALNTVVLMMKYY | 1499 |
| | . . . . . | |
| 1623 | SAPCTYELALKYLNIAFTMVFSLECVLKVIAFGFLNYFRDTWNIFDFITV | 1672 |
| | \|\|\|\|\|\|\|\|\|\|\|\|\|\|\|\|\|\|\|\|\|\|\|\|\|\|\|\|\|\|\|\|\|\|\|\|\|\|\|\|\|\|\|\|\|\|\|\|\|\| | |
| 1500 | SAPCTYELALKYLNIAFTMVFSLECVLKVIAFGFLNYFRDTWNIFDFITV | 1549 |
| | . . . . . | |
| 1673 | IGSITEIILTDSKLVNTSGFNMSFLKLFRAARLIKLLRQGYTIRILLWTF | 1722 |
| | \|\|\|\|\|\|\|\|\|\|\|\|\|\|\|\|\|\|\|\|\|\|\|\|\|\|\|\|\|\|\|\|\|\|\|\|\|\|\|\|\|\|\|\|\|\|\|\|\|\| | |
| 1550 | IGSITEIILTDSKLVNTSGFNMSFLKLFRAARLIKLLRQGYTIRILLWTF | 1599 |
| | . . . . . | |
| 1723 | VQSFKALPYVCLLIAMLFFIYAIIGMQVFGNIKLDEESHINRHNNFRSFF | 1772 |
| | \|\|\|\|\|\|\|\|\|\|\|\|\|\|\|\|\|\|\|\|\|\|\|\|\|\|\|\|\|\|\|\|\|\|\|\|\|\|\|\|\|\|\|\|\|\|\|\|\|\| | |
| 1600 | VQSFKALPYVCLLIAMLFFIYAIIGMQVFGNIKLDEESHINRHNNFRSFF | 1649 |
| | . . . . . | |
| 1773 | GSLMLLFRSATGEAWQEIMLSCLGEKGCEPDTTAPSGQNENERCGTDLAY | 1822 |
| | \|\|\|\|\|\|\|\|\|\|\|\|\|\|\|\|\|\|\|\|\|\|\|\|\|\|\|\|\|\|\|\|\|\|\|\|\|\|\|\|\|\|\|\|\|\|\|\|\|\| | |
| 1650 | GSLMLLFRSATGEAWQEIMLSCLGEKGCEPDTTAPSGQNENERCGTDLAY | 1699 |
| | . . . . . | |
| 1823 | VYFVSFIFFCSFLMLNLFVAVIMDNFEYLTRDSSILGPHHLDEPVRVWAE | 1872 |
| | \|\|\|\|\|\|\|\|\|\|\|\|\|\|\|\|\|\|\|\|\|\|\|\|\|\|\|\|\|\|\|\|\|\|\|\|\|\|\|\|\|\|\|\|\|\|\|\|\|\| | |
| 1700 | VYFVSFIFFCSFLMLNLFVAVIMDNFEYLTRDSSILGPHHLDEFVRVWAE | 1749 |
| 1873 | YDRAA | 1877 |
| | \|\|\|\|\| | |
| 1750 | YDRAA | 1754 |

### EXAMPLE 2

[0182] This Example relates to the variant T59742_P2 (SEQ ID NO:11; the nucleic acid sequence is given by SEQ ID NO:33), which is a variant alpha 1 subunit according to the present invention, and more specifically, is a splice variant of the known protein CCAA_HUMAN. This protein is the voltage-dependent P/Q-type calcium channel alpha-1A subunit, also referred to as the alpha subunit Cav2.1 or as the alpha 1A subunit. This subunit form is found in L type calcium channels, particularly in neural tissues. These calcium channels belong to the “high-voltage activated” (HVA) group and are blocked by the funnel toxin (Ftx) and by the omega-agatoxin-IVA (omega-Aga-IVA). They are however insensitive to dihydropyridines and certain other toxins.

[0183] Tissue specificity of the known protein is believed to be brain specific, as the alpha 1A subunit is mainly found in cerebellum, cerebral cortex, thalamus and hypothalamus. No expression is seen in heart, kidney, liver or muscle. Each of the four internal repeats contains five hydrophobic transmembrane segments (S1, S2, S3, S5, S6) and one positively charged transmembrane segment (S4). S4 segments probably represent the voltage-sensor and are characterized by a series of positively charged amino acids at every third position.

[0184] Defects in this subunit result in a number of different diseases, including spinocerebellar atxia type 6. This is an autosomal dominant disorder characterized by slowly progressive cerebellar ataxia of the limbs and gait, dysarthria, nystagmus, and mild vibratory and proprioceptive sensory loss. These symptoms are probably explained by severe loss of cerebellar Purkinje cells. Other defects in the CACNA1A gene are the cause of familial hemiplegic migraine (FHM), also known as migraine familial hemiplegic 1 (MHP1). FHM, a rare autosomal dominant subtype of migraine with aura, is associated with ictal hemiparesis and, in some families, progressive cerebellar atrophy.

[0185] Yet other such defects cause episodic ataxia type 2 (EA-2), also known as acetazolamide-responsive hereditary paroxysmal cerebellar ataxia (APCA). This autosomal dominant disorder is characterized by acetozolamide-responsive attacks of cerebellar ataxia and migraine-like symptoms, interictal nystagmus, and cerebellar atrophy.

[0186] The structure of the splice variant according to the present invention features a unique head, a unique insertion and a unique tail, as compared to the known protein sequence. An alignment is provided at the end of this section, while the comparison between the two sequences is described below.

[0187] According to preferred embodiments of the present invention, there is provided an isolated chimeric polypeptide encoding for T59742_P2, comprising a first amino acid sequence being at least 70%, optionally at least 80%, preferably at least 85%, more preferably at least 90% and most preferably at least 95% homologous to a polypeptide having the sequence (SEQ ID NO: 54) MSSWPTRPTKSTAPPRPGGKNGT corresponding to amino acids 1-23 of T59742_P2, a second amino acid sequence being at least 90% homologous to (SEQ ID NO: 55) TIIANCIVLALEQHLPDDDKTPMSERLDDTEPYFIGIFCFEAGIKIIALGFAFHKGSYLRNGWNVMDFVVVLTGILATVGTEFDLRTLRAVRVLRPLKLVSGIPSLQVVLKSIMKAMIPLLQIGLLLFFAILIFAIIGLEFYMGKFHTTCFEEGTDDIQGESPAPCGTEEPARTCPNGTKCQPYWEGPNNGITQFDNILFAVLTVFQCITMEGWTDLLYNSNDASGNTWNWLYFIPLIIIGSFFMLNLVLGVLSGEFAKERERVENRRAFLKLRRQQQIERELNGYMEWISKAEEVILAEDETDGEQRHPFDGALRRTTIKKSKTDLLNPEEAEDQLADIASVGSPFARASIKSAKLENSTFFHKKERRMRFYIRRMVKTQAFYWTVLSLVALNTLCVAIVHYNQPEWLSDFLYYAEFIFLGLFMSEMFIKMYGLGTRPYFHSSFNCFDCGVIIGSIFEVIWAVIKPGTSFGISVLRALRLLRIFKVTKYWASLRNLVVSLLNSMKSIISLLFLLFLFIVVFALLGMQLFGGQFNFDEGTPPTNFDTFPAAIMTVFQILTGEDWNEVMYDGIKSQGGVQGGMVFSIYFIVLTLFGNYTLLNVFLAIAVDNLANAQELTKDEQEEEEAANQKLALQKAKEVAEVSPLSAANMSIAVKEQQKNQKPAKSVWEQRTSEMRKQNLLASREALYNEMDPDERWKAAYTRHLRPDMKTHLDRPLVVDPQENRNNNTNKSRAAEPTVDQRLGQQRAEDFLRKQARYHDRARDPSGSAGLDARRPWAGSQEAELSREGPYGRESDHHAREGSLEQPGFWEGEAERGKAGDPHRRHVHRQGGSRESRSGSPRTGADGEHRRHRAHRRPGEEGPEDKAERRARHREGSRPARGGEGEGEGPDGGERRRRHRHGAPATYEGDARREDKERRHRRRKENQGSGVPVSGPNLSTTRPIQQDLGRQDPPLAEDIDNMKNNKLATAESAAPHGSLGHAGLPQSPAKMGNSTDPGPMLAIPAMATNPQNAASRRTPNNPGNPSNPGPPKTPENSLIVTNPSGTQTNSAKTARKPDHTTVDIPPACPPPLNHTVVQVNKNANPDPLPKKEEEKKEEEEDDRGEDGPKPMPPYSSMFILSTTNPLRRLCHYILNLRYFEMCILMVIAMSSIALAAEDPVQPNAPRNNVLRYFDYVFTGVFTFEMVIKMIDLGLVLHQGAYFRDLWNILDFIVVSGALVAFAFTGNSKGKDINTIKSLRVLRVLRPLKTIKRLPKLKAVFDCVVNSLKNVFNILIVYMLFMFIFAVVAVQLFKGKFFHCTDESKEFEKDCRGKYLLYEKNEVKARDREWKKYEFHYDNVLWALLTLFTVSTGEGWPQVLKHSVDATFENQGPSPGYRMEMSIFYVVYFVVFPFFFVNIFVALIIITFQEQGDKMMEEYSLEKNERACIDFAISAKPLTRHMPQNKQSFQYRMWQFVVSPPFEYTIMAMIALNTIVLMMKFYGASVAYENALRVFNIVFTSLFSLECVLKVMAFGILNYFRDAWNIFDFVTVLGSITDILVTEFGNNFINLSFLRLFRAARLIKLLRQGYTIRILLWTFVQSFKALPYVCLLIAMLFFIYAIIGMQVFGNIGIDVEDEDSDEDEFQITEHNNFRTFFQALMLLFRSATGEAWHNIMLSCLSGKPCDKNSGILTRECGNEFAYFYFVSFIFLCSFLMLNLFVAVIMDNFEYLTRDSSILGPHHLDEYVRVWAEYDPAA corresponding to amino acids 107-1843 of CCAA_HUMAN, which also corresponds to amino acids 24-1760 of T59742_P2, a third amino acid sequence being at least 70%, optionally at least 80%, preferably at least 85%, more preferably at least 90% and most preferably at least 95% homologous to a polypeptide having the sequence (SEQ ID NO: 56) CGRIHYKDMYSLLRVISPPLGLGKKCPHRVAC corresponding to amino acids 1761-1792 of T59742_P2, a fourth amino acid sequence being at least 90% homologous to (SEQ ID NO: 57) KRLLRMDLPVADDNTVHFNSTLMALIRTALDIKIAKGGADKQQMDAELRKEMMAIWPNLSQKTLDLLVTPHKSTDLTVGKIYAAMMIMEYYRQSKAKKLQAMREEQDRTPLMFQRMEPPSPTQEGGPGQNALPSTQLDPGGALMAHESGLKESPSWVTQRAQEMFQKTGTWSPEQGPPTDMPNSQPNSQSVEMREMGRDGYSDSEHYLPMEGQGRAASMPRLPAENQRRRGRPRGNNLSTISDTSPMKRSASVLGPKARRLDDYSLERVPPEENQRHHQRRRDRSHRASERSLGRYTDVDTGLGTDLSMTTQSGDLPSKERDQERGRPKDRKHRQHHHHHHHHHHPPPPDKDRYAQERPDHGRARARDQRWSRSPSEGREHMAHRQGSSSVSGSPAPSTSGTSTPRRGRRQLPQTPSTPRPHVSYSPVIRKAGGSGP corresponding to amino acids 1876-2312 of CCAA_HUMAN, which also corresponds to amino acids 1793-2229 of T59742_P2 and a fifth amino acid sequence being at least 70%, optionally at least 80%, preferably at least 85%, more preferably at least 90% and most preferably at least 95% homologous to a polypeptide having the sequence (SEQ ID NO: 58) RSSSSSSSSSSSRRWPGRAGRPPAALGGTQAPRPSLWPEIGRPRGATAAAARPGWRGGSQARPGASPPGPVDTAGPGGRHLARTCPRGPRVPGTMATTGAPTTTRPMARAAGAARRPWPGPTTRHPPYDTRPRAPPGARPGLPGPRARPAPRLLGTAGDSPTATTRRTDWPGPAGRAPGRACTNPTARVTMIGAKPGRGGARPAPHAPHAHTPPEEPRRGRGGPAQRARERASRETPDSGEARAGPQGCPAETLGQKRPSWAATAPPNQPRSPHPRQGLSGGRQGADKPHSQGI corresponding to amino acids 2230-2523 of T59742_P2, wherein said first amino acid sequence, second amino acid sequence, third amino acid sequence, fourth amino acid sequence, and fifth amino acid sequence are contiguous and in a sequential order.

[0188] According to preferred embodiments of the present invention, there is provided an isolated polypeptide encoding for a head of T59742_P2, comprising a polypeptide being at least 70%, optionally at least about 80%, preferably at least about 85%, more preferably at least about 90% and most preferably at least about 95% homologous to the sequence (SEQ ID NO: 59) MSSWPTRPTKSTAPPRPGGKNGT of T59742_P2.

[0189] According to preferred embodiments of the present invention, there is provided an isolated polypeptide encoding for a tail of T59742_P2, comprising a polypeptide being at least 70%, optionally at least about 80%, preferably at least about 85%, more preferably at least about 90% and most preferably at least about 95% homologous to the sequence (SEQ ID NO: 60) RSSSSSSSSSSSRRWPGRAGRPPAALGGTQAPRPSLWPEIGRPRGATAAAARPGWRGGSQARPGASPPGPVDTAGPGGRHLARTCPRGPRVPGTMATTGAPTTTRPMARAAGAARRPWPGPTTRHPPYDTRPRAPPGARPGLPGPRARPAPRLLGTAGDSPTATTRRTDWPGPAGRAPGRACTNPTARVTMIGAKPGRGGARPAPHAPHAHTPPEEPRRGRGGPAQRARERASRETPDSGEARAGPQGCPAETLGQKRPSWAATAPPNQPRSPHPRQGLSGGRQGADKPHSQGI in T59742_P2.

[0190] According to preferred embodiments of the present invention, there is provided an isolated polypeptide encoding for a unique insertion of T59742_P2, comprising a polypeptide being at least 70%, optionally at least about 80%, preferably at least about 85%, more preferably at least about 90% and most preferably at least about 95% homologous to the sequence (SEQ ID NO: 61) CGRIHYKDMYSLLRVISPPLGLGKKCPHRVAC in T59742_P2.

[0191] Domains affected by alternative splicing in this variant include the cytoplasmic N-terminus region of the protein, the S1 transmembrane domain of domain I and the cytoplasmic C-terminus region of the protein.

[0192] Without wishing to be limited by a single hypothesis, it should be noted that these affected domains may affect the function of the resulting calcium channel. In particular, as described above, at least two different C-terminal motifs, having different lengths, have been found in different alpha 1 subunits. These motifs may be generated through the formation of different splice variants. For example, the P/Q Cav2.1 isoforms are generated by alternative splice donor sites at the 5′ end of exon 47, causing a stop codon to form and the protein to be truncated. An alternative donor site results in insertion of five bases leading to a frame shift and an elongation of the C-terminus by 244 amino acids.

[0193] For these neuronal channels, as the C-terminus becomes shorter, the current amplitude increases and calcium-dependent inactivation also increases.

[0194] Furthermore, with regard to L-type channels specifically, particular domains in the C-terminus region (L, K and an IA motif) have been found to bind calmodulin (CaM) involved in Ca⁺²-induced inactivation. In addition, these channels contain a highly specific Ca⁺² sensor composed of motifs which are important for Ca+2-dependent inactivation of the channel. Ca⁺² loading of this sensor was shown to modulate the CaM affinity of CaM-binding site in the domain.

[0195] From the above description of the effect of changes to the C-terminus domain of this variant, it is expected that the variant has a greater current amplitude as compared to the known protein and a stronger calcium dependence of inactivation (ie greater sensitivity to calcium influx).

Sequence name: CCAA_HUMAN

documentation:

of: T59742_P2 (SEQ ID NO: 11)×CCAA_HUMAN (SEQ ID NO: 62) . . .

Alignment segment 1/1:

[0196] Quality: 2130.00

Escore: 0

Matching length: 2170 Total

length: 2559

Matching Percent Similarity: 100.00 Matching Percent

Identity: 100.00

Total Percent Similarity: 84.80 Total Percent

Identity: 84.80

[0197] Gaps: 4

[0198] Alignment:

| | . . . . . | |
|---|---|---|
| 1 | MSSWPTRPTKSTAPPRPGGKNGTTIIANCIVLALEQHLPDDDKTPMSERL | 50 |
| | \|\|\|\|\|\|\|\|\|\|\|\|\|\|\|\|\|\|\|\|\|\|\|\|\|\|\| | |
| 107 | .......................TIIANCIVLALEQHLPDDDKTPMSERL | 133 |
| | . . . . . | |
| 51 | DDTEPYFIGIFCFEAGIKIIALGFAFHKGSYLRNGWNVMDFVVVLTGILA | 100 |
| | \|\|\|\|\|\|\|\|\|\|\|\|\|\|\|\|\|\|\|\|\|\|\|\|\|\|\|\|\|\|\|\|\|\|\|\|\|\|\|\|\|\|\|\|\|\|\|\|\|\| | |
| 134 | DDTEPYFIGIFCFEAGIKIIALGFAFHKGSYLRNGWNVMDFVVVLTGILA | 183 |
| | . . . . . | |
| 101 | TVGTEFDLRTLRAVRVLRPLKLVSGIPSLQVVLKSIMKAMIPLLQIGLLL | 150 |
| | \|\|\|\|\|\|\|\|\|\|\|\|\|\|\|\|\|\|\|\|\|\|\|\|\|\|\|\|\|\|\|\|\|\|\|\|\|\|\|\|\|\|\|\|\|\|\|\|\|\| | |
| 184 | TVGTEFDLRTLRAVRVLRPLKLVSGIPSLQVVLKSIMKAMIPLLQIGLLL | 233 |
| | . . . . . | |
| 151 | FFAILIFAIIGLEFYMGKFHTTCFEEGTDDIQGESPAPCGTEEPARTCPN | 200 |
| | \|\|\|\|\|\|\|\|\|\|\|\|\|\|\|\|\|\|\|\|\|\|\|\|\|\|\|\|\|\|\|\|\|\|\|\|\|\|\|\|\|\|\|\|\|\|\|\|\|\| | |
| 234 | FFAILIFAIIGLEFYMGKFHTTCFEEGTDDIQGESPAPCGTEEPARTCPN | 283 |
| | . . . . . | |
| 201 | GTKCQPYWEGPNNGITQFDNILFAVLTVFQCITMEGWTDLLYNSNDASGN | 250 |
| | \|\|\|\|\|\|\|\|\|\|\|\|\|\|\|\|\|\|\|\|\|\|\|\|\|\|\|\|\|\|\|\|\|\|\|\|\|\|\|\|\|\|\|\|\|\|\|\|\|\| | |
| 284 | GTKCQPYWEGPNNGITQFDNILFAVLTVFQCITMEGWTDLLYNSNDASGN | 333 |
| | . . . . . | |
| 251 | TWNWLYFIPLIIIGSFFMLNLVLGVLSGEFAKERERVENRRAFLKLRRQQ | 300 |
| | \|\|\|\|\|\|\|\|\|\|\|\|\|\|\|\|\|\|\|\|\|\|\|\|\|\|\|\|\|\|\|\|\|\|\|\|\|\|\|\|\|\|\|\|\|\|\|\|\|\| | |
| 334 | TWNWLYFIPLIIIGSFFMLNLVLGVLSGEFAKERERVENRRAFLKLRRQQ | 383 |
| | . . . . . | |
| 301 | QIERELNGYMEWISKAEEVILAEDETDGEQRHPFDGALRRTTIKKSKTDL | 350 |
| | \|\|\|\|\|\|\|\|\|\|\|\|\|\|\|\|\|\|\|\|\|\|\|\|\|\|\|\|\|\|\|\|\|\|\|\|\|\|\|\|\|\|\|\|\|\|\|\|\|\| | |
| 384 | QIERELNGYMEWISKAEEVILAEDETDGEQRHPFDGALRRTTIKKSKTDL | 433 |
| | . . . . . | |
| 351 | LNPEEAEDQLADIASVGSPFARASIKSAKLENSTFFHKKERRMRFYIRRM | 400 |
| | \|\|\|\|\|\|\|\|\|\|\|\|\|\|\|\|\|\|\|\|\|\|\|\|\|\|\|\|\|\|\|\|\|\|\|\|\|\|\|\|\|\|\|\|\|\|\|\|\|\| | |
| 434 | LNPEEAEDQLADIASVGSPFARASIKSAKLENSTFFHKKERRMRFYIRRM | 483 |
| | . . . . . | |
| 401 | VKTQAFYWTVLSLVALNTLCVAIVHYNQPEWLSDFLYYAEFIFLGLFMSE | 450 |
| | \|\|\|\|\|\|\|\|\|\|\|\|\|\|\|\|\|\|\|\|\|\|\|\|\|\|\|\|\|\|\|\|\|\|\|\|\|\|\|\|\|\|\|\|\|\|\|\|\|\| | |
| 484 | VKTQAFYWTVLSLVALNTLCVAIVHYNQPEWLSDFLYYAEFIFLGLGMSE | 533 |
| | . . . . . | |
| 451 | MFIKMYGLGTRPYFHSSFNCFDCGVIIGSIFEVIWAVIKPGTSFGISVLR | 500 |
| | \|\|\|\|\|\|\|\|\|\|\|\|\|\|\|\|\|\|\|\|\|\|\|\|\|\|\|\|\|\|\|\|\|\|\|\|\|\|\|\|\|\|\|\|\|\|\|\|\|\| | |
| 534 | MFIKMYGLGTRPYFHSSFNCFDCGVIIGSIFEVIWAVIKPGTSFGISVLR | 583 |
| | . . . . . | |
| 501 | ALRLLRIFKVTKYWASLRNLVVSLLNSMKSIISLLFLLFLFIVVFALLGM | 550 |
| | \|\|\|\|\|\|\|\|\|\|\|\|\|\|\|\|\|\|\|\|\|\|\|\|\|\|\|\|\|\|\|\|\|\|\|\|\|\|\|\|\|\|\|\|\|\|\|\|\|\| | |
| 584 | ALRLLRIFKVTKYWASLRNLVVSLLNSMKSIISLLFLLFLFIVVFALLGM | 633 |
| | . . . . . | |
| 551 | QLFGGQFNFDEGTPPTNFDTFPAAIMTVFQILTGEDWNEVMYDGIKSQGG | 600 |
| | \|\|\|\|\|\|\|\|\|\|\|\|\|\|\|\|\|\|\|\|\|\|\|\|\|\|\|\|\|\|\|\|\|\|\|\|\|\|\|\|\|\|\|\|\|\|\|\|\|\| | |
| 634 | QLFGGQFNFDEGTPPTNFDTFPAAIMTVFQILTGEDWNEVMYDGIKSQGG | 683 |
| | . . . . . | |
| 601 | VQGGMVFSIYFIVLTLFGNYTLLNVFLAIAVDNLANAQELTKDEQEEEEA | 650 |
| | \|\|\|\|\|\|\|\|\|\|\|\|\|\|\|\|\|\|\|\|\|\|\|\|\|\|\|\|\|\|\|\|\|\|\|\|\|\|\|\|\|\|\|\|\|\|\|\|\|\| | |
| 684 | VQGGMVFSIYFIVLTLFGNYTLLNVFLAIAVDNLANAQELTKDEQEEEEA | 733 |
| | . . . . . | |
| 651 | ANQKLALQKAKEVAEVSPLSAANMSIAVKEQQKNQKPAKSVWEQRTSEMR | 700 |
| | \|\|\|\|\|\|\|\|\|\|\|\|\|\|\|\|\|\|\|\|\|\|\|\|\|\|\|\|\|\|\|\|\|\|\|\|\|\|\|\|\|\|\|\|\|\|\|\|\|\| | |
| 734 | ANQKLALQKAKEVAEVSPLSAANMSIAVKEQQKNQKPAKSVWEQRTSEMR | 783 |
| | . . . . . | |
| 701 | KQNLLASREALYNEMDPDERWKAAYTRHLRPDMKTHLDRPLVVDPQENRN | 750 |
| | \|\|\|\|\|\|\|\|\|\|\|\|\|\|\|\|\|\|\|\|\|\|\|\|\|\|\|\|\|\|\|\|\|\|\|\|\|\|\|\|\|\|\|\|\|\|\|\|\|\| | |
| 784 | KQNLLASREALYNEMDPDERWKAAYTRHLRPDMKTHLDRPLVVDPQENRN | 833 |
| | . . . . . | |
| 751 | NNTNKSRAAEPTVDQRLGQQRAEDFLRKQARYHDRARDPSGSAGLDARRP | 800 |
| | \|\|\|\|\|\|\|\|\|\|\|\|\|\|\|\|\|\|\|\|\|\|\|\|\|\|\|\|\|\|\|\|\|\|\|\|\|\|\|\|\|\|\|\|\|\|\|\|\|\| | |
| 834 | NNTNKSRAAEPTVDQRLGQQRAEDFLRKQARYHDRARDPSGSAGLDARRP | 883 |
| | . . . . . | |
| 801 | WAGSQEAELSREGPYGRESDHHAREGSLEQPGFWEGEAERGKAGDPHRRH | 850 |
| | \|\|\|\|\|\|\|\|\|\|\|\|\|\|\|\|\|\|\|\|\|\|\|\|\|\|\|\|\|\|\|\|\|\|\|\|\|\|\|\|\|\|\|\|\|\|\|\|\|\| | |
| 884 | WAGSQEAELSREGPYGRESDHHAREGSLEQPGFWEGEAERGKAGDPHRRH | 933 |
| | . . . . . | |
| 851 | VHRQGGSRESRSGSPRTGADGEHRRHRAHRRPGEEGPEDKAERRARHREG | 900 |
| | \|\|\|\|\|\|\|\|\|\|\|\|\|\|\|\|\|\|\|\|\|\|\|\|\|\|\|\|\|\|\|\|\|\|\|\|\|\|\|\|\|\|\|\|\|\|\|\|\|\| | |
| 934 | VHRQGGSRESRSGSPRTGADGEHRRHRAHRRPGEEGPEDKAERRARHREG | 983 |
| | . . . . . | |
| 901 | SRPARGGEGEGEGPDGGERRRRHRHGAPATYEGDARREDKERRHRRRKEN | 950 |
| | \|\|\|\|\|\|\|\|\|\|\|\|\|\|\|\|\|\|\|\|\|\|\|\|\|\|\|\|\|\|\|\|\|\|\|\|\|\|\|\|\|\|\|\|\|\|\|\|\|\| | |
| 984 | SRPARGGEGEGEGPDGGERRRRHRHGAPATYEGDARREDKERRHRRRKEN | 1033 |
| | . . . . . | |
| 951 | QGSGVPVSGPNLSTTRPIQQDLGRQDPPLAEDIDNMKNNKLATAESAAPH | 1000 |
| | \|\|\|\|\|\|\|\|\|\|\|\|\|\|\|\|\|\|\|\|\|\|\|\|\|\|\|\|\|\|\|\|\|\|\|\|\|\|\|\|\|\|\|\|\|\|\|\|\|\| | |
| 1034 | QGSGVPVSGPNLSTTRPIQQDLGRQDPPLAEDIDNMKNNKLATAESAAPH | 1083 |
| | . . . . . | |
| 1001 | GSLGHAGLPQSPAKMGNSTDPGPMLAIPAMATNPQNAASRRTPNNPGNPS | 1050 |
| | \|\|\|\|\|\|\|\|\|\|\|\|\|\|\|\|\|\|\|\|\|\|\|\|\|\|\|\|\|\|\|\|\|\|\|\|\|\|\|\|\|\|\|\|\|\|\|\|\|\| | |
| 1084 | GSLGHAGLPQSPAKMGNSTDPGPMLAIPAMATNPQNAASRRTPNNPGNPS | 1133 |
| | . . . . . | |
| 1051 | NPGPPKTPENSLIVTNPSGTQTNSAKTARKPDHTTVDIPPACPPPLNHTV | 1100 |
| | \|\|\|\|\|\|\|\|\|\|\|\|\|\|\|\|\|\|\|\|\|\|\|\|\|\|\|\|\|\|\|\|\|\|\|\|\|\|\|\|\|\|\|\|\|\|\|\|\|\| | |
| 1134 | NPGPPKTPENSLIVTNPSGTQTNSAKTARKPDHTTVDIPPACPPPLNHTV | 1183 |
| | . . . . . | |
| 1101 | VQVNKNANPDPLPKKEEEKKEEEEDDRGEDGPKPMPPYSSMFILSTTNPL | 1150 |
| | \|\|\|\|\|\|\|\|\|\|\|\|\|\|\|\|\|\|\|\|\|\|\|\|\|\|\|\|\|\|\|\|\|\|\|\|\|\|\|\|\|\|\|\|\|\|\|\|\|\| | |
| 1184 | VQVNKNANPDPLPKKEEEKKEEEEDDRGEDGPKPMPPYSSMFILSTTNPL | 1233 |
| | . . . . . | |
| 1151 | RRLCHYILNLRYFEMCILMVIAMSSIALAAEDPVQPNAPRNNVLRYFDYV | 1200 |
| | \|\|\|\|\|\|\|\|\|\|\|\|\|\|\|\|\|\|\|\|\|\|\|\|\|\|\|\|\|\|\|\|\|\|\|\|\|\|\|\|\|\|\|\|\|\|\|\|\|\| | |
| 1234 | RRLCHYILNLRYFEMCILMVIAMSSIALAAEDPVQPNAPRNNVLRYFDYV | 1283 |
| | . . . . . | |
| 1201 | FTGVFTFEMVIKMIDLGLVLHQGAYFRDLWNILDFIVVSGALVAFAFTGN | 1250 |
| | \|\|\|\|\|\|\|\|\|\|\|\|\|\|\|\|\|\|\|\|\|\|\|\|\|\|\|\|\|\|\|\|\|\|\|\|\|\|\|\|\|\|\|\|\|\|\|\|\|\| | |
| 1284 | FTGVFTFEMVIKMIDLGLVLHQGAYFRDLWNILDFIVVSGALVAFAFTGN | 1333 |
| | . . . . . | |
| 1251 | SKGKDINTIKSLRVLRVLRPLKTIKRLPKLKAVFDCVVNSLKNVFNILIV | 1300 |
| | \|\|\|\|\|\|\|\|\|\|\|\|\|\|\|\|\|\|\|\|\|\|\|\|\|\|\|\|\|\|\|\|\|\|\|\|\|\|\|\|\|\|\|\|\|\|\|\|\|\| | |
| 1334 | SKGKDINTIKSLRVLRVLRPLKTIKRLPKLKAVFDCVVNSLKNVFNILIV | 1383 |
| | . . . . . | |
| 1301 | YMLFMFIFAVVAVQLFKGKFFHCTDESKEFEKDCRGKYLLYEKNEVKARD | 1350 |
| | \|\|\|\|\|\|\|\|\|\|\|\|\|\|\|\|\|\|\|\|\|\|\|\|\|\|\|\|\|\|\|\|\|\|\|\|\|\|\|\|\|\|\|\|\|\|\|\|\|\| | |
| 1384 | YMLFMFIFAVVAVQLFKGKFFHCTDESKEFEKDCRGKYLLYEKNEVKARD | 1433 |
| | . . . . . | |
| 1351 | REWKKYEFHYDNVLWALLTLFTVSTGEGWPQVLKHSVDATFENQGPSPGY | 1400 |
| | \|\|\|\|\|\|\|\|\|\|\|\|\|\|\|\|\|\|\|\|\|\|\|\|\|\|\|\|\|\|\|\|\|\|\|\|\|\|\|\|\|\|\|\|\|\|\|\|\|\| | |
| 1434 | REWKKYEFHYDNVLWALLTLFTVSTGEGWPQVLKHSVDATFENQGPSPGY | 1483 |
| | . . . . . | |
| 1401 | RMEMSIFYVVYFVVFPFFFVNIFVALIIITFQEQGDKMMEEYSLEKNERA | 1450 |
| | \|\|\|\|\|\|\|\|\|\|\|\|\|\|\|\|\|\|\|\|\|\|\|\|\|\|\|\|\|\|\|\|\|\|\|\|\|\|\|\|\|\|\|\|\|\|\|\|\|\| | |
| 1484 | RMEMSIFYVVYFVVFPFFFVNIFVALIIITFQEQGDKMMEEYSLEKNERA | 1533 |
| | . . . . . | |
| 1451 | CIDFAISAKPLTRHMPQNKQSFQYRMWQFVVSPPFEYTIMAMIALNTIVL | 1500 |
| | \|\|\|\|\|\|\|\|\|\|\|\|\|\|\|\|\|\|\|\|\|\|\|\|\|\|\|\|\|\|\|\|\|\|\|\|\|\|\|\|\|\|\|\|\|\|\|\|\|\| | |
| 1534 | CIDFAISAKPLTRHMPQNKQSFQYRMWQFVVSPPFEYTIMAMIALNTIVL | 1583 |
| | . . . . . | |
| 1501 | MMKFYGASVAYENALRVFNIVFTSLFSLECVLKVMAFGILNYFRDAWNIF | 1550 |
| | \|\|\|\|\|\|\|\|\|\|\|\|\|\|\|\|\|\|\|\|\|\|\|\|\|\|\|\|\|\|\|\|\|\|\|\|\|\|\|\|\|\|\|\|\|\|\|\|\|\| | |
| 1584 | MMKFYGASVAYENALRVFNIVFTSLFSLECVLKVMAFGILNYFRDAWNIF | 1633 |
| | . . . . . | |
| 1551 | DFVTVLGSITDILVTEFGNNFINLSFLRLFRAARLIKLLRQGYTIRILLW | 1600 |
| | \|\|\|\|\|\|\|\|\|\|\|\|\|\|\|\|\|\|\|\|\|\|\|\|\|\|\|\|\|\|\|\|\|\|\|\|\|\|\|\|\|\|\|\|\|\|\|\|\|\| | |
| 1634 | DFVTVLGSITDILVTEFGNNFINLSFLRLFRAARLIKLLRQGYTIRILLW | 1683 |
| | . . . . . | |
| 1601 | TFVQSFKALPYVCLLIAMLFFIYAIIGMQVFGNIGIDVEDEDSDEDEFQI | 1650 |
| | \|\|\|\|\|\|\|\|\|\|\|\|\|\|\|\|\|\|\|\|\|\|\|\|\|\|\|\|\|\|\|\|\|\|\|\|\|\|\|\|\|\|\|\|\|\|\|\|\|\| | |
| 1684 | TFVQSFKALPYVCLLIAMLFFIYAIIGMQVFGNIGIDVEDEDSDEDEFQI | 1733 |
| | . . . . . | |
| 1651 | TEHNNFRTFFQALMLLFRSATGEAWHNIMLSCLSGKPCDKNSGILTRECG | 1700 |
| | \|\|\|\|\|\|\|\|\|\|\|\|\|\|\|\|\|\|\|\|\|\|\|\|\|\|\|\|\|\|\|\|\|\|\|\|\|\|\|\|\|\|\|\|\|\|\|\|\|\| | |
| 1734 | TEHNNFRTFFQALMLLFRSATGEAWHNIMLSCLSGKPCDKNSGILTRECG | 1783 |
| | . . . . . | |
| 1701 | NEFAYFYFVSFIFLCSFLMLNLFVAVIMDNFEYLTRDSSILGPHHLDEYV | 1750 |
| | \|\|\|\|\|\|\|\|\|\|\|\|\|\|\|\|\|\|\|\|\|\|\|\|\|\|\|\|\|\|\|\|\|\|\|\|\|\|\|\|\|\|\|\|\|\|\|\|\|\| | |
| 1784 | NEFAYFYFVSFIFLCSFLMLNLFVAVIMDNFEYLTRDSSILGPHHLDEYV | 1833 |
| | . . . . . | |
| 1751 | RVWAEYDPAA...............................CGRI | 1764 |
| | \|\|\|\|\|\|\|\|\|\| | |
| 1834 | RVWAEYDPAAWGRMPYLDMYQMLRHMSPPLGLGKKCPARVA.... | 1875 |
| | . . . . . | |
| 1765 | HYKDMYSLLRVISPPLGLGKKCPHRVACKRLLRMDLPVADDNTVHFNSTL | 1814 |
| | \|\|\|\|\|\|\|\|\|\|\|\|\|\|\|\|\|\|\|\|\|\| | |
| 1876 | ............................KRLLRMDLPVADDNTVHFNSTL | 1897 |
| | . . . . . | |
| 1815 | MALIRTALDIKIAKGGADKQQMDAELRKEMMAIWPNLSQKTLDLLVTPHK | 1864 |
| | \|\|\|\|\|\|\|\|\|\|\|\|\|\|\|\|\|\|\|\|\|\|\|\|\|\|\|\|\|\|\|\|\|\|\|\|\|\|\|\|\|\|\|\|\|\|\|\|\|\| | |
| 1898 | MALIRTALDIKIAKGGADKQQMDAELRKEMMAIWPNLSQKTLDLLVTPHK | 1947 |
| | . . . . . | |
| 1865 | STDLTVGKIYAAMMIMEYYRQSKAKKLQAMREEQDRTPLMFQRMEPPSPT | 1914 |
| | \|\|\|\|\|\|\|\|\|\|\|\|\|\|\|\|\|\|\|\|\|\|\|\|\|\|\|\|\|\|\|\|\|\|\|\|\|\|\|\|\|\|\|\|\|\|\|\|\|\| | |
| 1948 | STDLTVGKIYAAMMIMEYYRQSKAKKLQAMREEQDRTPLMFQRMEPPSPT | 1997 |
| | . . . . . | |
| 1915 | QEGGPGQNALPSTQLDPGGALMAHESGLKESPSWVTQRAQEMFQKTGTWS | 1964 |
| | \|\|\|\|\|\|\|\|\|\|\|\|\|\|\|\|\|\|\|\|\|\|\|\|\|\|\|\|\|\|\|\|\|\|\|\|\|\|\|\|\|\|\|\|\|\|\|\|\|\| | |
| 1998 | QEGGPGQNALPSTQLDPGGALMAHESGLKESPSWVTQRAQEMFQKTGTWS | 2047 |
| | . . . . . | |
| 1965 | PEQGPPTDMPNSQPNSQSVEMREMGRDGYSDSEHYLPMEGQGRAASMPRL | 2014 |
| | \|\|\|\|\|\|\|\|\|\|\|\|\|\|\|\|\|\|\|\|\|\|\|\|\|\|\|\|\|\|\|\|\|\|\|\|\|\|\|\|\|\|\|\|\|\|\|\|\|\| | |
| 2048 | PEQGPPTDMPNSQPNSQSVEMREMGRDGYSDSEHYLPMEGQGRAASMPRL | 2097 |
| | . . . . . | |
| 2015 | PAENQRRRGRPRGNNLSTISDTSPMKRSASVLGPKARRLDDYSLERVPPE | 2064 |
| | \|\|\|\|\|\|\|\|\|\|\|\|\|\|\|\|\|\|\|\|\|\|\|\|\|\|\|\|\|\|\|\|\|\|\|\|\|\|\|\|\|\|\|\|\|\|\|\|\|\| | |
| 2098 | PAENQRRRGRPRGNNLSTISDTSPMKRSASVLGPKARRLDDYSLERVPPE | 2147 |
| | . . . . . | |
| 2065 | ENQRHHQRRRDRSHRASERSLGRYTDVDTGLGTDLSMTTQSGDLPSKERD | 2114 |
| | \|\|\|\|\|\|\|\|\|\|\|\|\|\|\|\|\|\|\|\|\|\|\|\|\|\|\|\|\|\|\|\|\|\|\|\|\|\|\|\|\|\|\|\|\|\|\|\|\|\| | |
| 2148 | ENQRHHQRRRDRSHRASERSLGRYTDVDTGLGTDLSMTTQSGDLPSKERD | 2197 |
| | . . . . . | |
| 2115 | QERGRPKDRKHRQHHHHHHHHHHPPPPDKDRYAQERPDHGRARARDQRWS | 2164 |
| | \|\|\|\|\|\|\|\|\|\|\|\|\|\|\|\|\|\|\|\|\|\|\|\|\|\|\|\|\|\|\|\|\|\|\|\|\|\|\|\|\|\|\|\|\|\|\|\|\|\| | |
| 2198 | QERGRPKDRKHRQHHHHHHHHHHPPPPDKDRYAQERPDHGRARARDQRWS | 2247 |
| | . . . . . | |
| 2165 | RSPSEGREHMAHRQGSSSVSGSPAPSTSGTSTPRRGRRQLPQTPSTPRPH | 2214 |
| | \|\|\|\|\|\|\|\|\|\|\|\|\|\|\|\|\|\|\|\|\|\|\|\|\|\|\|\|\|\|\|\|\|\|\|\|\|\|\|\|\|\|\|\|\|\|\|\|\|\| | |
| 2248 | RSPSEGREHMAHRQGSSSVSGSPAPSTSGTSTPRRGRRQLPQTPSTPRPH | 2297 |
| | . . . . . | |
| 2215 | VSYSPVIRKAGGSGPRSSSSSSSSSSSRRWPGRAGRPPAALGGTQAPRPS | 2264 |
| | \|\|\|\|\|\|\|\|\|\|\|\|\|\|\| | |
| 2298 | VSYSPVIRKAGGSGP................................... | 2312 |
| | . . . . . | |
| 2265 | LWPEIGRPRGATAAAARPGWRGGSQARPGASPPGPVDTAGPGGRHLARTC | 2314 |
| 2312 | .................................................. | 2312 |
| | . . . . . | |
| 2315 | PRGPRVPGTMATTGAPTTTRPMARAAGAARRPWPGPTTRHPPYDTRPRAP | 2364 |
| 2312 | .................................................. | 2312 |
| | . . . . . | |
| 2365 | PGARPGLPGPRARPAPRLLGTAGDSPTATTRRTDWPGPAGRAPGRACTNP | 2414 |
| 2312 | .................................................. | 2312 |
| | . . . . . | |
| 2415 | TARVTMIGAKPGRGGARPAPHAPHAHTPPEEPRRGRGGPAQRARERASRE | 2464 |
| 2312 | .................................................. | 2312 |
| | . . . . . | |
| 2465 | TPDSGEARAGPQGCPAETLGQKRPSWAATAPPNQPRSPHPRQGLSGGRQG | 2514 |
| 2312 | .................................................. | 2312 |
| 2515 | ADKPHSQGI | 2523 |
| 2312 | ......... | 2312 |

### EXAMPLE 3

[0199] This Example relates to the variant T59742_P7 (SEQ ID NO:10; the nucleic acid sequence is given by SEQ ID NO:32), which is a variant alpha 1 subunit according to the present invention, and more specifically, is a splice variant of the known protein CCAA_HUMAN. The known protein structure and function is described above in Example 2.

[0200] The structure of the splice variant according to the present invention features a unique head and a unique tail, as compared to the known protein sequence. An alignment is provided at the end of this section, while the comparison between the two sequences is described below.

[0201] According to preferred embodiments of the present invention, there is provided an isolated chimeric polypeptide encoding for T59742_P7, comprising a first amino acid sequence being at least 70%, optionally at least 80%, preferably at least 85%, more preferably at least 90% and most preferably at least 95% homologous to a polypeptide having the sequence (SEQ ID NO: 63) MSSWPTRPTKSTAPPRPGGKNGT corresponding to amino acids 1-23 of T59742_P7, a second amino acid sequence being at least 90% homologous to (SEQ ID NO: 64) TIIANCIVLALEQHLPDDDKTPMSERLDDTEPYFIGIFCFEAGIKIIALGFAFHKGSYLRNGWNVMDFVVVLTGILATVGTEFDLRTLRAVRVLRPLKLVSGIPSLQVVLKSIMKAMIPLLQIGLLLFFAILIFAIIGLEFYMGKFHTTCFEEGTDDIQGESPAPCGTEEPARTCPNGTKCQPYWEGPNNGITQFDNILFAVLTVFQCITMEGWTDLLYNSNDASGNTWNWLYFIPLIIIGSFFMLNLVLGVLSGEFAKERERVENRRAFLKLRRQQQIERELNGYMEWISKAEEVILAEDETDGEQRHPFDGALRRTTIKKSKTDLLNPEEAEDQLADIASVGSPFARASIKSAKLENSTFFHKKERRMRFYIRRMVKTQAFYWTVLSLVALNTLCVAIVHYNQPEWLSDFLYYAEFIFLGLFMSEMFIKMYGLGTRPYFHSSFNCFDCGVIIGSIFEVIWAVIKPGTSFGISVLRALRLLRIFKVTKYWASLRNLVVSLLNSMKSIISLLFLLFLFIVVFALLGMQLFGGQFNFDEGTPPTNFDTFPAAIMTVFQILTGEDWNEVMYDGIKSQGGVQGGMVFSIYFIVLTLFGNYTLLNVFLAIAVDNLANAQELTKDEQEEEEAANQKLALQKAKEVAEVSPLSAANMSIAVKEQQKNQKPAKSVWEQRTSEMRKQNLLASREALYNEMDPDERWKAAYTRHLRPDMKTHLDRPLVVDPQENRNNNTNKSRAAEPTVDQRLGQQRAEDFLRKQARYHDRARDPSGSAGLDARRPWAGSQEAELSREGPYGRESDHHAREGSLEQPGFWEGEAERGKAGDPHRRHVHRQGGSRESRSGSPRTGADGEHRRHRAHRRPGEEGPEDKAERRARHREGSRPARGGEGEGEGPDGGERRRRHRHGAPATYEGDARREDKERRHRRRKENQGSGVPVSGPNLSTTRPIQQDLGRQDPPLAEDIDNMKNNKLATAESAAPHGSLGHAGLPQSPAKMGNSTDPGPMLAIPAMATNPQNAASRRTPNNPGNPSNPGPPKTPENSLIVTNPSGTQTNSAKTARKPDHTTVDIPPACPPPLNHTVVQVNKNANPDPLPKKEEEKKEEEEDDRGEDGPKPMPPYSSMFILSTTNPLRRLCHYILNLRYFEMCILMVIAMSSIALAAEDPVQPNAPRNNVLRYFDYVFTGVFTFEMVIKMIDLGLVLHQGAYFRDLWNILDFIVVSGALVAFAFTGNSKGKDINTIKSLRVLRVLRPLKTIKRLPKLKAVFDCVVNSLKNVFNILIVYMLFMFIFAVVAVQLFKGKFFHCTDESKEFEKDCRGKYLLYEKNEVKARDREWKKYEFHYDNVLWALLTLFTVSTGEGWPQVLKHSVDATFENQGPSPGYRMEMSIFYVVYFVVFPFFFVNIFVALIIITFQEQGDKMMEEYSLEKNERACIDFAISAKPLTRHMPQNKQSFQYRMWQFVVSPPFEYTIMAMIALNTIVLMMKFYGASVAYENALRVFNIVFTSLFSLECVLKVMAFGILNYFRDAWNIFDFVTVLGSITDILVTEFG corresponding to amino acids 107-1651 of CCAA_HUMAN, which also corresponds to amino acids 24-1568 of T59742_P7, and a third amino acid sequence being at least 70%, optionally at least 80%, preferably at least 85%, more preferably at least 90% and most preferably at least 95% homologous to a polypeptide having the sequence (SEQ ID NO: 66) AWSRATPPSPRS corresponding to amino acids 1569-1580 of T59742_P7, wherein said first amino acid sequence, second amino acid sequence and third amino acid sequence are contiguous and in a sequential order.

[0202] According to preferred embodiments of the present invention, there is provided an isolated polypeptide encoding for a head of T59742_P7, comprising a polypeptide being at least 70%, optionally at least about 80%, preferably at least about 85%, more preferably at least about 90% and most preferably at least about 95% homologous to the sequence (SEQ ID NO: 65) MSSWPTRPTKSTAPPRPGGKNGT of T59742_P7.

[0203] According to preferred embodiments of the present invention, there is provided an isolated polypeptide encoding for a tail of T59742_P7, comprising a polypeptide being at least 70%, optionally at least about 80%, preferably at least about 85%, more preferably at least about 90% and most preferably at least about 95% homologous to the sequence (SEQ ID NO: 66) AWSRATPPSPRS in T59742_P7.

[0204] Domains affected by alternative splicing of this variant are as follows: the cytoplasmic N-terminus region of the protein; the S1 transmembrane domain of domain I; the extracellular loop between S3 and S4 transmembrane domains of domain IV; the S4 transmembrane domain of domain IV; the extracellular loop between S4 and S5 transmembrane domains of domain IV; the S5 transmembrane domain of domain IV; the pore loop region between S5 and S6 transmembrane domains of domain IV; the S6 transmembrane domain of domain IV; and the cytoplasmic C-terminus region of the protein.

[0205] The effects on the C-terminal regions of this alpha 1 subunit type are described above with regard to Example 2.

[0206] The extracellular loops between S3 and S4 may influence S4 voltage sensor function because of their close proximity to the S4 segments, which must move upon depolarization, as previously described. It is possible that alternative splicing in these areas could affect the voltage sensor function of S4, even if the S4 region itself were not altered.

[0207] With regard to effects in domain IV, as this splice variant is a variant of alpha subunit Cav2.1, even introducing only two amino acids (NP) by insertion of exon 31a can have a significant functional effect. In P/Q-type Cav2.1 channels, the presence of NP slows activation and inactivation and decreases affinity to ω-agatoxin IVA. The NP variant is found in Q-type (low ω-agatoxin IVA affinity) channels, while the variant lacking NP is found in P-type (high affinity) calcium channels. The more rapidly gating P-type calcium channel has been found in cerebellar Purkinje cells, as well as pancreatic beta cells.

[0208] From the above description of the effect of changes to the C-terminus domain of this variant, it is expected that the variant has a greater current amplitude as compared to the known protein, as well as stronger calcium dependence of inactivation (greater sensitivity to calcium influx).

[0209] From the above description of changes in the extracellular loop between S3 and S4 transmembrane domains of domain IV, it is expected that the variant has a different voltage sensor function as compared to the known protein.

Sequence name: CCAA_HUMAN

documentation:

of: T59742_P7 (residues 24-1568 or SEQ ID NO: 10)×CCAA_HUMAN (SEQ ID NO: 67). . .

segment 1/1:

[0210] Quality: 15207.00

Escore: 0

Matching length: 1545 Total

length: 1545

Matching Percent Similarity: 100.00 Matching Percent

Identity: 100.00

Total Percent Similarity: 100.00 Total Percent

Identity: 100.00

[0211] Gaps: 0

| | . . . . . | |
|---|---|---|
| 24 | TIIANCIVLALEQHLPDDDKTPMSERLDDTEPYFIGIFCFEAGIKIIALG | 73 |
| | \|\|\|\|\|\|\|\|\|\|\|\|\|\|\|\|\|\|\|\|\|\|\|\|\|\|\|\|\|\|\|\|\|\|\|\|\|\|\|\|\|\|\|\|\|\|\|\|\|\| | |
| 107 | TIIANCIVLALEQHLPDDDKTPMSERLDDTEPYFIGIFCFEAGIKIIALG | 156 |
| | . . . . . | |
| 74 | FAFHKGSYLRNGWNVMDFVVVLTGILATVGTEFDLRTLRAVRVLRPLKLV | 123 |
| | \|\|\|\|\|\|\|\|\|\|\|\|\|\|\|\|\|\|\|\|\|\|\|\|\|\|\|\|\|\|\|\|\|\|\|\|\|\|\|\|\|\|\|\|\|\|\|\|\|\| | |
| 157 | FAFHKGSYLRNGWNVMDFVVVLTGILATVGTEFDLRTLRAVRVLRPLKLV | 206 |
| | . . . . . | |
| 124 | SGIPSLQVVLKSIMKAMIPLLQIGLLLFFAILIFAIIGLEFYMGKFHTTC | 173 |
| | \|\|\|\|\|\|\|\|\|\|\|\|\|\|\|\|\|\|\|\|\|\|\|\|\|\|\|\|\|\|\|\|\|\|\|\|\|\|\|\|\|\|\|\|\|\|\|\|\|\| | |
| 207 | SGIPSLQVVLKSIMKAMIPLLQIGLLLFFAILIFAIIGLEFYMGKFHTTC | 256 |
| | . . . . . | |
| 174 | FEEGTDDIQGESPAPCGTEEPARTCPNGTKCQPYWEGPNNGITQFDNILF | 223 |
| | \|\|\|\|\|\|\|\|\|\|\|\|\|\|\|\|\|\|\|\|\|\|\|\|\|\|\|\|\|\|\|\|\|\|\|\|\|\|\|\|\|\|\|\|\|\|\|\|\|\| | |
| 257 | FEEGTDDIQGESPAPCGTEEPARTCPNGTKCQPYWEGPNNGITQFDNILF | 306 |
| | . . . . . | |
| 224 | AVLTVFQCITMEGWTDLLYNSNDASGNTWNWLYFIPLIIIGSFFMLNLVL | 273 |
| | \|\|\|\|\|\|\|\|\|\|\|\|\|\|\|\|\|\|\|\|\|\|\|\|\|\|\|\|\|\|\|\|\|\|\|\|\|\|\|\|\|\|\|\|\|\|\|\|\|\| | |
| 307 | AVLTVFQCITMEGWTDLLYNSNDASGNTWNWLYFIPLIIIGSFFMLNLVL | 356 |
| | . . . . . | |
| 274 | GVLSGEFAKERERVENRRAFLKLRRQQQIERELNGYMEWISKAEEVILAE | 323 |
| | \|\|\|\|\|\|\|\|\|\|\|\|\|\|\|\|\|\|\|\|\|\|\|\|\|\|\|\|\|\|\|\|\|\|\|\|\|\|\|\|\|\|\|\|\|\|\|\|\|\| | |
| 357 | GVLSGEFAKERERVENRRAFLKLRRQQQIERELNGYMEWISKAEEVILAE | 406 |
| | . . . . . | |
| 324 | DETDGEQRHPFDGALRRTTIKKSKTDLLNPEEAEDQLADIASVGSPFARA | 373 |
| | \|\|\|\|\|\|\|\|\|\|\|\|\|\|\|\|\|\|\|\|\|\|\|\|\|\|\|\|\|\|\|\|\|\|\|\|\|\|\|\|\|\|\|\|\|\|\|\|\|\| | |
| 407 | DETDGEQRHPFDGALRRTTIKKSKTDLLNPEEAEDQLADIASVGSPFARA | 456 |
| | . . . . . | |
| 374 | SIKSAKLENSTFFHKKERRMRFYIRRMVKTQAFYWTVLSLVALNTLCVAI | 423 |
| | \|\|\|\|\|\|\|\|\|\|\|\|\|\|\|\|\|\|\|\|\|\|\|\|\|\|\|\|\|\|\|\|\|\|\|\|\|\|\|\|\|\|\|\|\|\|\|\|\|\| | |
| 457 | SIKSAKLENSTFFHKKERRMRFYIRRMVKTQAFYWTVLSLVALNTLCVAI | 506 |
| | . . . . . | |
| 424 | VHYNQPEWLSDFLYYAEFIFLGLFMSEMFIKMYGLGTRPYFHSSFNCFDC | 473 |
| | \|\|\|\|\|\|\|\|\|\|\|\|\|\|\|\|\|\|\|\|\|\|\|\|\|\|\|\|\|\|\|\|\|\|\|\|\|\|\|\|\|\|\|\|\|\|\|\|\|\| | |
| 507 | VHYNQPEWLSDFLYYAEFIFLGLFMSEMFIKMYGLGTRPYFHSSFNCFDC | 556 |
| | . . . . . | |
| 474 | GVIIGSIFEVIWAVIKPGTSFGISVLRALRLLRIFKVTKYWASLRNLVVS | 523 |
| | \|\|\|\|\|\|\|\|\|\|\|\|\|\|\|\|\|\|\|\|\|\|\|\|\|\|\|\|\|\|\|\|\|\|\|\|\|\|\|\|\|\|\|\|\|\|\|\|\|\| | |
| 557 | GVIIGSIFEVIWAVIKPGTSFGISVLRALRLLRIFKVTKYWASLRNLVVS | 606 |
| | . . . . . | |
| 524 | LLNSMKSIISLLFLLFLFIVVFALLGMQLFGGQFNFDEGTPPTNFDTFPA | 573 |
| | \|\|\|\|\|\|\|\|\|\|\|\|\|\|\|\|\|\|\|\|\|\|\|\|\|\|\|\|\|\|\|\|\|\|\|\|\|\|\|\|\|\|\|\|\|\|\|\|\|\| | |
| 607 | LLNSMKSIISLLFLLFLFIVVFALLGMQLFGGQFNFDEGTPPTNFDTFPA | 656 |
| | . . . . . | |
| 574 | AIMTVFQILTGEDWNEVMYDGIKSQGGVQGGMVFSIYFIVLTLFGNYTLL | 623 |
| | \|\|\|\|\|\|\|\|\|\|\|\|\|\|\|\|\|\|\|\|\|\|\|\|\|\|\|\|\|\|\|\|\|\|\|\|\|\|\|\|\|\|\|\|\|\|\|\|\|\| | |
| 657 | AIMTVFQILTGEDWNEVMYDGIKSQGGVQGGMVFSIYFIVLTLFGNYTLL | 706 |
| | . . . . . | |
| 624 | NVFLAIAVDNLANAQELTKDEQEEEEAANQKLALQKAKEVAEVSPLSAAN | 673 |
| | \|\|\|\|\|\|\|\|\|\|\|\|\|\|\|\|\|\|\|\|\|\|\|\|\|\|\|\|\|\|\|\|\|\|\|\|\|\|\|\|\|\|\|\|\|\|\|\|\|\| | |
| 707 | NVFLAIAVDNLANAQELTKDEQEEEEAANQKLALQKAKEVAEVSPLSAAN | 756 |
| | . . . . . | |
| 674 | MSIAVKEQQKNQKPAKSVWEQRTSEMRKQNLLASREALYNEMDPDERWKA | 723 |
| | \|\|\|\|\|\|\|\|\|\|\|\|\|\|\|\|\|\|\|\|\|\|\|\|\|\|\|\|\|\|\|\|\|\|\|\|\|\|\|\|\|\|\|\|\|\|\|\|\|\| | |
| 757 | MSIAVKEQQKNQKPAKSVWEQRTSEMRKQNLLASREALYNEMDPDERWKA | 806 |
| | . . . . . | |
| 724 | AYTRHLRPDMKTHLDRPLVVDPQENRNNNTNKSRAAEPTVDQRLGQQRAE | 773 |
| | \|\|\|\|\|\|\|\|\|\|\|\|\|\|\|\|\|\|\|\|\|\|\|\|\|\|\|\|\|\|\|\|\|\|\|\|\|\|\|\|\|\|\|\|\|\|\|\|\|\| | |
| 807 | AYTRHLRPDMKTHLDRPLVVDPQENRNNNTNKSRAAEPTVDQRLGQQRAE | 856 |
| | . . . . . | |
| 774 | DFLRKQARYHDRARDPSGSAGLDARRPWAGSQEAELSREGPYGRESDHHA | 823 |
| | \|\|\|\|\|\|\|\|\|\|\|\|\|\|\|\|\|\|\|\|\|\|\|\|\|\|\|\|\|\|\|\|\|\|\|\|\|\|\|\|\|\|\|\|\|\|\|\|\|\| | |
| 857 | DFLRKQARYHDRARDPSGSAGLDARRPWAGSQEAELSREGPYGRESDHHA | 906 |
| | . . . . . | |
| 824 | REGSLEQPGFWEGEAERGKAGDPHRRHVHRQGGSRESRSGSPRTGADGEH | 873 |
| | \|\|\|\|\|\|\|\|\|\|\|\|\|\|\|\|\|\|\|\|\|\|\|\|\|\|\|\|\|\|\|\|\|\|\|\|\|\|\|\|\|\|\|\|\|\|\|\|\|\| | |
| 907 | REGSLEQPGFWEGEAERGKAGDPHRRHVHRQGGSRESRSGSPRTGADGEH | 956 |
| | . . . . . | |
| 874 | RRHRAHRRPGEEGPEDKAERRARHREGSRPARGGEGEGEGPDGGERRRRH | 923 |
| | \|\|\|\|\|\|\|\|\|\|\|\|\|\|\|\|\|\|\|\|\|\|\|\|\|\|\|\|\|\|\|\|\|\|\|\|\|\|\|\|\|\|\|\|\|\|\|\|\|\| | |
| 957 | RRHRAHRRPGEEGPEDKAERRARHREGSRPARGGEGEGEGPDGGERRRRH | 1006 |
| | . . . . . | |
| 924 | RHGAPATYEGDARREDKERRHRRRKENQGSGVPVSGPNLSTTRPIQQDLG | 973 |
| | \|\|\|\|\|\|\|\|\|\|\|\|\|\|\|\|\|\|\|\|\|\|\|\|\|\|\|\|\|\|\|\|\|\|\|\|\|\|\|\|\|\|\|\|\|\|\|\|\|\| | |
| 1007 | RHGAPATYEGDARREDKERRHRRRKENQGSGVPVSGPNLSTTRPIQQDLG | 1056 |
| | . . . . . | |
| 974 | RQDPPLAEDIDNMKNNKLATAESAAPHGSLGHAGLPQSPAKMGNSTDPGP | 1023 |
| | \|\|\|\|\|\|\|\|\|\|\|\|\|\|\|\|\|\|\|\|\|\|\|\|\|\|\|\|\|\|\|\|\|\|\|\|\|\|\|\|\|\|\|\|\|\|\|\|\|\| | |
| 1057 | RQDPPLAEDIDNMKNNKLATAESAAPHGSLGHAGLPQSPAKMGNSTDPGP | 1106 |
| | . . . . . | |
| 1024 | MLAIPAMATNPQNAASRRTPNNPGNPSNPGPPKTPENSLIVTNPSGTQTN | 1073 |
| | \|\|\|\|\|\|\|\|\|\|\|\|\|\|\|\|\|\|\|\|\|\|\|\|\|\|\|\|\|\|\|\|\|\|\|\|\|\|\|\|\|\|\|\|\|\|\|\|\|\| | |
| 1107 | MLAIPAMATNPQNAASRRTPNNPGNPSNPGPPKTPENSLIVTNPSGTQTN | 1156 |
| | . . . . . | |
| 1074 | SAKTARKPDHTTVDIPPACPPPLNHTVVQVNKNANPDPLPKKEEEKKEEE | 1123 |
| | \|\|\|\|\|\|\|\|\|\|\|\|\|\|\|\|\|\|\|\|\|\|\|\|\|\|\|\|\|\|\|\|\|\|\|\|\|\|\|\|\|\|\|\|\|\|\|\|\|\| | |
| 1157 | SAKTARKPDHTTVDIPPACPPPLNHTVVQVNKNANPDPLPKKEEEKKEEE | 1206 |
| | . . . . . | |
| 1124 | EDDRGEDGPKPMPPYSSMFILSTTNPLRRLCHYILNLRYFEMCILMVIAM | 1173 |
| | \|\|\|\|\|\|\|\|\|\|\|\|\|\|\|\|\|\|\|\|\|\|\|\|\|\|\|\|\|\|\|\|\|\|\|\|\|\|\|\|\|\|\|\|\|\|\|\|\|\| | |
| 1207 | EDDRGEDGPKPMPPYSSMFILSTTNPLRRLCHYILNLRYFEMCILMVIAM | 1256 |
| | . . . . . | |
| 1174 | SSIALAAEDPVQPNAPRNNVLRYFDYVFTGVFTFEMVIKMIDLGLVLHQG | 1223 |
| | \|\|\|\|\|\|\|\|\|\|\|\|\|\|\|\|\|\|\|\|\|\|\|\|\|\|\|\|\|\|\|\|\|\|\|\|\|\|\|\|\|\|\|\|\|\|\|\|\|\| | |
| 1257 | SSIALAAEDPVQPNAPRNNVLRYFDYVFTGVFTFEMVIKMIDLGLVLHQG | 1306 |
| | . . . . . | |
| 1224 | AYFRDLWNILDFIVVSGALVAFAFTGNSKGKDINTIKSLRVLRVLRPLKT | 1273 |
| | \|\|\|\|\|\|\|\|\|\|\|\|\|\|\|\|\|\|\|\|\|\|\|\|\|\|\|\|\|\|\|\|\|\|\|\|\|\|\|\|\|\|\|\|\|\|\|\|\|\| | |
| 1307 | AYFRDLWNILDFIVVSGALVAFAFTGNSKGKDINTIKSLRVLRVLRPLKT | 1356 |
| | . . . . . | |
| 1274 | IKRLPKLKAVFDCVVNSLKNVFNILIVYMLFMFIFAVVAVQLFKGKFFHC | 1323 |
| | \|\|\|\|\|\|\|\|\|\|\|\|\|\|\|\|\|\|\|\|\|\|\|\|\|\|\|\|\|\|\|\|\|\|\|\|\|\|\|\|\|\|\|\|\|\|\|\|\|\| | |
| 1357 | IKRLPKLKAVFDCVVNSLKNVFNILIVYMLFMFIFAVVAVQLFKGKFFHC | 1406 |
| | . . . . . | |
| 1324 | TDESKEFEKDCRGKYLLYEKNEVKARDREWKKYEFHYDNVLWALLTLFTV | 1373 |
| | \|\|\|\|\|\|\|\|\|\|\|\|\|\|\|\|\|\|\|\|\|\|\|\|\|\|\|\|\|\|\|\|\|\|\|\|\|\|\|\|\|\|\|\|\|\|\|\|\|\| | |
| 1407 | TDESKEFEKDCRGKYLLYEKNEVKARDREWKKYEFHYDNVLWALLTLFTV | 1456 |
| | . . . . . | |
| 1374 | STGEGWPQVLKHSVDATFENQGPSPGYRMEMSIFYVVYFVVFPFFFVNIF | 1423 |
| | \|\|\|\|\|\|\|\|\|\|\|\|\|\|\|\|\|\|\|\|\|\|\|\|\|\|\|\|\|\|\|\|\|\|\|\|\|\|\|\|\|\|\|\|\|\|\|\|\|\| | |
| 1457 | STGEGWPQVLKHSVDATFENQGPSPGYRMEMSIFYVVYFVVFPFFFVNIF | 1506 |
| | . . . . . | |
| 1424 | VALIIITFQEQGDKMMEEYSLEKNERACIDFAISAKPLTRHMPQNKQSFQ | 1473 |
| | \|\|\|\|\|\|\|\|\|\|\|\|\|\|\|\|\|\|\|\|\|\|\|\|\|\|\|\|\|\|\|\|\|\|\|\|\|\|\|\|\|\|\|\|\|\|\|\|\|\| | |
| 1507 | VALIIITFQEQGDKMMEEYSLEKNERACIDFAISAKPLTRHMPQNKQSFQ | 1556 |
| | . . . . . | |
| 1474 | YRMWQFVVSPPFEYTIMAMIALNTIVLMMKFYGASVAYENALRVFNIVFT | 1523 |
| | \|\|\|\|\|\|\|\|\|\|\|\|\|\|\|\|\|\|\|\|\|\|\|\|\|\|\|\|\|\|\|\|\|\|\|\|\|\|\|\|\|\|\|\|\|\|\|\|\|\| | |
| 1557 | YRMWQFVVSPPFEYTIMAMIALNTIVLMMKFYGASVAYENALRVFNIVFT | 1606 |
| | . . . . | |
| 1524 | SLFSLECVLKVMAFGILNYFRDAWNIFDFVTVLGSITDILVTEFG | 1568 |
| | \|\|\|\|\|\|\|\|\|\|\|\|\|\|\|\|\|\|\|\|\|\|\|\|\|\|\|\|\|\|\|\|\|\|\|\|\|\|\|\|\|\|\|\|\| | |
| 1607 | SLFSLECVLKVMAFGILNYFRDAWNIFDFVTVLGSITDILVTEFG | 1651 |

### EXAMPLE 4

[0212] This Example relates to the variant T59742_P3 (SEQ ID NO:14; the nucleic acid sequence is given by SEQ ID NO:36), which is a variant alpha 1 subunit according to the present invention, and more specifically, is a splice variant of the known protein CCAA_HUMAN. The known protein structure and function is described above in Example 2.

[0213] The structure of the splice variant according to the present invention features a unique insertion and a unique tail, as compared to the known protein sequence. An alignment is provided at the end of this section, while the comparison between the two sequences is described below.

[0214] According to preferred embodiments of the present invention, there is provided an isolated chimeric polypeptide encoding for T59742_P3, comprising a first amino acid sequence being at least 90% homologous to (SEQ ID NO: 68) MARFGDEMPARYGGGGSGAAAGVVVGSGGGRGAGGSRQGGQPGAQRMYKQSMAQRARTMALYNPIPVRQNCLTVNRSLFLFSEDNVVRKYAKKITEWPPFEYMILATIIANCIVLALEQHLPDDDKTPMSERLDDTEPYFIGIFCFEAGIKIIALGFAFHKGSYLRNGWNVMDFVVVLTGILATVGTEFDLRTLRAVRVLRPLKLVSGIPSLQVVLKSIMKAMIPLLQIGLLLFFAILIFAIIGLEFYMGKFHTTCFEEGTDDIQGESPAPCGTEEPARTCPNGTKCQPYWEGPNNGITQFDNILFAVLTVFQCITMEGWTDLLYNSNDASGNTWNWLYFIPLIIIGSFFMLNLVLGVLSGEFAKERERVENRRAFLKLRRQQQIERELNGYMEWISKAEEVILAEDETDGEQRHPFDGALRRTTIKKSKTDLLNPEEAEDQLADIASVGSPFARASIKSAKLENSTFFHKKERRMRFYIRRMVKTQAFYWTVLSLVALNTLCVAIVHYNQPEWLSDFLYYAEFIFLGLFMSEMFIKMYGLGTRPYFHSSFNCFDCGVIIGSIFEVIWAVIKPGTSFGISVLRALRLLRIFKVTKYWASLRNLVVSLLNSMKSIISLLFLLFLFIVVFALLGMQLFGGQFNFDEGTPPTNFDTFPAAIMTVFQILTGEDWNEVMYDGIKSQGGVQGGMVFSIYFIVLTLFGNYTLLNVFLAIAVDNLANAQELTKDEQEEEEAANQKLALQKAKEVAEVSPLSAANMSIAVKEQQKNQKPAKSVWEQRTSEMRKQNLLASREALYNEMDPDERWKAAYTRHLRPDMKTHLDRPLVVDPQENRNNNTNKSRAAEPTVDQRLGQQRAEDFLRKQARYHDRARDPSGSAGLDARRPWAGSQEAELSREGPYGRESDHHAREGSLEQPGFWEGEAERGKAGDPHRRHVHRQGGSRESRSGSPRTGADGEHRRHRAHRRPGEEGPEDKAERRARHREGSRPARGGEGEGEGPDGGERRRRHRHGAPATYEGDARREDKERRHRRRKENQGSGVPVSGPNLSTTRPIQQDLGRQDPPLAEDIDNMKNNKLATAESAAPHGSLGHAGLPQSPAKMGNSTDPGPMLAIPAMATNPQNAASRRTPNNPGNPSNPGPPKTPENSLIVTNPSGTQTNSAKTARKPDHTTVDIPPACPPPLNHTVVQVNKNANPDPLPKKEEEKKEEEEDDRGEDGPKPMPPYSSMFILSTTNPLRRLCHYILNLRYFEMCILMVIAMSSIALAAEDPVQPNAPRNNVLRYFDYVFTGVFTFEMVIKMIDLGLVLHQGAYFRDLWNILDFIVVSGALVAFAFTGNSKGKDINTIKSLRVLRVLRPLKTIKRLPKLKAVFDCVVNSLKNVFNILIVYMLFMFIFAVVAVQLFKGKFFHCTDESKEFEKDCRGKYLLYEKNEVKARDREWKKYEFHYDNVLWALLTLFTVSTGEGWPQVLKHSVDATFENQGPSPGYRMEMSIFYVVYFVVFPFFFVNIFVALIIITFQEQGDKMMEEYSLEKNERACIDFAISAKPLTRHMPQNKQSFQYRMWQFVVSPPFEYTIMAMIALNTIVLMMKFYGASVAYENALRVFNIVFTSLFSLECVLKVMAFGILNYFRDAWNIFDFVTVLGSITDILVTEFGNNFINLSFLRLFRAARLIKLLRQGYTIRILLWTFVQSFKALPYVCLLIAMLFFIYAIIGMQVFGNIGIDVEDEDSDEDEFQITEHNNFRTFFQALMLLFRSATGEAWHNIMLSCLSGKPCDKNSGILTRECGNEFAYFYFVSFIFLCSFLMLNLFVAVIMDNFEYLTRDSSILGPHHLDEYVRVWAEYDPAA corresponding to amino acids 1-1843 of CCAA_HUMAN, which also corresponds to amino acids 1-1843 of T59742_P3, a second amino acid sequence being at least 70%, optionally at least 80%, preferably at least 85%, more preferably at least 90% and most preferably at least 95% homologous to a polypeptide having the sequence (SEQ ID NO: 73) CGRIHYKDMYSLLRVISPPLGLGKKCPHRVAC corresponding to amino acids 1844-1875 of T59742_P3, a third amino acid sequence being at least 90% homologous to (SEQ ID NO: 69) KRLLRMDLPVADDNTVHFNSTLMALIRTALDIKIAKGGADKQQMDAELRKEMMAIWPNLSQKTLDLLVTPHKSTDLTVGKIYAAMMIMEYYRQSKAKKLQAMREEQDRTPLMFQRMEPPSPTQEGGPGQNALPSTQLDPGGALMAHESGLKESPSWVTQRAQEMFQKTGTWSPEQGPPTDMPNSQPNSQSVEMREMGRDGYSDSEHYLPMEGQGRAASMPRLPAENQRRRGRPRGNNLSTISDTSPMKRSASVLGPKARRLDDYSLERVPPEENQRHHQRRRDRSHRASERSLGRYTDVDTGLGTDLSMTTQSGDLPSKERDQERGRPKDRKHRQHHHHHHHHHHPPPPDKDRYAQERPDHGRARARDQRWSRSPSEGREHMAHRQGSSSVSGSPAPSTSGTSTPRRGRRQLPQTPSTPRPHVSYSPVIRKAGGSGP corresponding to amino acids 1876-2312 of CCAA_HUMAN, which also corresponds to amino acids 1876-2312 of T59742_P3, a bridging amino acid R corresponding to amino acid 2313 of T59742_P3, a fourth amino acid sequence being at least 90% homologous to (SEQ ID NO: 70) QQQQQQQQQQ corresponding to amino acids 2314-2323 of CCAA_HUMAN, which also corresponds to amino acids 2314-2323 of T59742_P3 and a fifth amino acid sequence being at least 70%, optionally at least 80%, preferably at least 85%, more preferably at least 90% and most preferably at least 95% homologous to a polypeptide having the sequence (SEQ ID NO: 71) HSSSSSSSSSSSRRWPGRAGRPPAALGGTQAPRPSLWPEIGRPRGATAAAARPGWRGGSQARPGASPPGPVDTAGPGGRHLARTCPRGPRVPGTMATTGAPTTTRPMARAAGAARRPWPGPTTRHPPYDTRPRAPPGARPGLPGPRARPAPRLLGTAGDSPTATTRRTDWPGPAGRAPGRACTNPTARVTMIGAKPGRGGARPAPHAPHAHTPPEEPRRGRGGPAQRARERASRETPDSGEARAGPQGCPAETLGQKRPSWAATAPPNQPRSPHPRQGLSGGRQGADKPHSQGI corresponding to amino acids 2324-2617 of T59742_P3, wherein said first amino acid sequence, second amino acid sequence, third amino acid sequence, bridging amino acid, fourth amino acid sequence, and fifth amino acid sequence are contiguous and in a sequential order.

[0215] According to preferred embodiments of the present invention, there is provided an isolated polypeptide encoding for a tail of T59742_P3, comprising a polypeptide being at least 70%, optionally at least about 80%, preferably at least about 85%, more preferably at least about 90% and most preferably at least about 95% homologous to the sequence (SEQ ID NO: 72) HSSSSSSSSSSSRRWPGRAGRPPAALGGTQAPRPSLWPEIGRPRGATAAAARPGWRGGSQARPGASPPGPVDTAGPGGRHLARTCPRGPRVPGTMATTGAPTTTRPMARAAGAARRPWPGPTTRHPPYDTRPRAPPGARPGLPGPRARPAPRLLGTAGDSPTATTRRTDWPGPAGRAPGRACTNPTARVTMIGAKPGRGGARPAPHAPHAHTPPEEPRRGRGGPAQRARERASRETPDSGEARAGPQGCPAETLGQKRPSWAATAPPNQPRSPHPRQGLSGGRQGADKPHSQGI in T59742_P3.

[0216] According to preferred embodiments of the present invention, there is provided an isolated polypeptide encoding for a unique of T59742_P3, comprising a polypeptide being at least 70%, optionally at least about 80%, preferably at least about 85%, more preferably at least about 90% and most preferably at least about 95% homologous to the sequence (SEQ ID NO: 73) CGRIHYKDMYSLLRVISPPLGLGKKCPHRVAC in T59742_P3.

[0217] Domains affected by alternative splicing include the cytoplasmic C-terminus region of the protein.

[0218] The effects on the C-terminal regions of this alpha 1 subunit type are described above with regard to Example 2.

[0219] From the above description of the effect of changes to the C-terminus domain of this variant, it is expected that the variant has greater current amplitude as compared to the known protein, and a stronger calcium dependence of inactivation.

[0220] In addition, since there is a change in the calcium-binding region, it is expected that the calcium binding characteristics of the channel will differ from those of the known protein and will be modulated in some manner (increased or decreased).

Sequence name: CCAA_HUMAN

documentation:

of: T59742_P3 (SEQ ID NO: 14)×CCAA_HUMAN (SEQ ID NO: 74) . . .

Alignment segment 1/1:

[0221] Quality: 2246.00

Escore: 0

Matching length: 2276

length: 2653

Matching Percent Similarity: 100.00 Matching Percent

Identity: 100.00

Total Percent Similarity: 85.79 Total Percent

Identity: 85.79

[0222] Gaps: 3

[0223] Alignment:

| | . . . . . | |
|---|---|---|
| 1 | MARFGDEMPARYGGGGSGAAAGVVVGSGGGRGAGGSRQGGQPGAQRMYKQ | 50 |
| | \|\|\|\|\|\|\|\|\|\|\|\|\|\|\|\|\|\|\|\|\|\|\|\|\|\|\|\|\|\|\|\|\|\|\|\|\|\|\|\|\|\|\|\|\|\|\|\|\|\| | |
| 1 | MARFGDEMPARYGGGGSGAAAGVVVGSGGGRGAGGSRQGGQPGAQRMYKQ | 50 |
| | . . . . . | |
| 51 | SMAQRARTMALYNPIPVRQNCLTVNRSLFLFSEDNVVRKYAKKITEWPPF | 100 |
| | \|\|\|\|\|\|\|\|\|\|\|\|\|\|\|\|\|\|\|\|\|\|\|\|\|\|\|\|\|\|\|\|\|\|\|\|\|\|\|\|\|\|\|\|\|\|\|\|\|\| | |
| 51 | SMAQRARTMALYNPIPVRQNCLTVNRSLFLFSEDNVVRKYAKKITEWPPF | 100 |
| | . . . . . | |
| 101 | EYMILATIIANCIVLALEQHLPDDDKTPMSERLDDTEPYFIGIFCFEAGI | 150 |
| | \|\|\|\|\|\|\|\|\|\|\|\|\|\|\|\|\|\|\|\|\|\|\|\|\|\|\|\|\|\|\|\|\|\|\|\|\|\|\|\|\|\|\|\|\|\|\|\|\|\| | |
| 101 | EYMILATIIANCIVLALEQHLPDDDKTPMSERLDDTEPYFIGIFCFEAGI | 150 |
| | . . . . . | |
| 151 | KIIALGFAFHKGSYLRNGWNVMDFVVVLTGILATVGTEFDLRTLRAVRVL | 200 |
| | \|\|\|\|\|\|\|\|\|\|\|\|\|\|\|\|\|\|\|\|\|\|\|\|\|\|\|\|\|\|\|\|\|\|\|\|\|\|\|\|\|\|\|\|\|\|\|\|\|\| | |
| 151 | KIIALGFAFHKGSYLRNGWNVMDFVVVLTGILATVGTEFDLRTLRAVRVL | 200 |
| | . . . . . | |
| 201 | RPLKLVSGIPSLQVVLKSIMKAMIPLLQIGLLLFFAILIFAIIGLEFYMG | 250 |
| | \|\|\|\|\|\|\|\|\|\|\|\|\|\|\|\|\|\|\|\|\|\|\|\|\|\|\|\|\|\|\|\|\|\|\|\|\|\|\|\|\|\|\|\|\|\|\|\|\|\| | |
| 201 | RPLKLVSGIPSLQVVLKSIMKAMIPLLQIGLLLFFAILIFAIIGLEFYMG | 250 |
| | . . . . . | |
| 251 | KFHTTCFEEGTDDIQGESPAPCGTEEPARTCPNGTKCQPYWEGPNNGITQ | 300 |
| | \|\|\|\|\|\|\|\|\|\|\|\|\|\|\|\|\|\|\|\|\|\|\|\|\|\|\|\|\|\|\|\|\|\|\|\|\|\|\|\|\|\|\|\|\|\|\|\|\|\| | |
| 251 | KFHTTCFEEGTDDIQGESPAPCGTEEPARTCPNGTKCQPYWEGPNNGITQ | 300 |
| | . . . . . | |
| 301 | FDNILFAVLTVFQCITMEGWTDLLYNSNDASGNTWNWLYFIPLIIIGSFF | 350 |
| | \|\|\|\|\|\|\|\|\|\|\|\|\|\|\|\|\|\|\|\|\|\|\|\|\|\|\|\|\|\|\|\|\|\|\|\|\|\|\|\|\|\|\|\|\|\|\|\|\|\| | |
| 301 | FDNILFAVLTVFQCITMEGWTDLLYNSNDASGNTWNWLYFIPLIIIGSFF | 350 |
| | . . . . . | |
| 351 | MLNLVLGVLSGEFAKERERVENRRAFLKLRRQQQIERELNGYMEWISKAE | 400 |
| | \|\|\|\|\|\|\|\|\|\|\|\|\|\|\|\|\|\|\|\|\|\|\|\|\|\|\|\|\|\|\|\|\|\|\|\|\|\|\|\|\|\|\|\|\|\|\|\|\|\| | |
| 351 | MLNLVLGVLSGEFAKERERVENRRAFLKLRRQQQIERELNGYMEWISKAE | 400 |
| | . . . . . | |
| 401 | EVILAEDETDGEQRHPFDGALRRTTIKKSKTDLLNPEEAEDQLADIASVG | 450 |
| | \|\|\|\|\|\|\|\|\|\|\|\|\|\|\|\|\|\|\|\|\|\|\|\|\|\|\|\|\|\|\|\|\|\|\|\|\|\|\|\|\|\|\|\|\|\|\|\|\|\| | |
| 401 | EVILAEDETDGEQRHPFDGALRRTTIKKSKTDLLNPEEAEDQLADIASVG | 450 |
| | . . . . . | |
| 451 | SPFARASIKSAKLENSTFFHKKERRMRFYIRRMVKTQAFYWTVLSLVALN | 500 |
| | \|\|\|\|\|\|\|\|\|\|\|\|\|\|\|\|\|\|\|\|\|\|\|\|\|\|\|\|\|\|\|\|\|\|\|\|\|\|\|\|\|\|\|\|\|\|\|\|\|\| | |
| 451 | SPFARASIKSAKLENSTFFHKKERRMRFYIRRMVKTQAFYWTVLSLVALN | 500 |
| | . . . . . | |
| 501 | TLCVAIVHYNQPEWLSDFLYYAEFIFLGLFMSEMFIKMYGLGTRPYFHSS | 550 |
| | \|\|\|\|\|\|\|\|\|\|\|\|\|\|\|\|\|\|\|\|\|\|\|\|\|\|\|\|\|\|\|\|\|\|\|\|\|\|\|\|\|\|\|\|\|\|\|\|\|\| | |
| 501 | TLCVAIVHYNQPEWLSDFLYYAEFIFLGLFMSEMFIKMYGLGTRPYFHSS 550 | |
| | . . . . . | |
| 551 | FNCFDCGVIIGSIFEVIWAVIKPGTSFGISVLRALRLLRIFKVTKYWASL | 600 |
| | \|\|\|\|\|\|\|\|\|\|\|\|\|\|\|\|\|\|\|\|\|\|\|\|\|\|\|\|\|\|\|\|\|\|\|\|\|\|\|\|\|\|\|\|\|\|\|\|\|\| | |
| 551 | FNCFDCGVIIGSIFEVIWAVIKPGTSFGISVLRALRLLRIFKVTKYWASL | 600 |
| | . . . . . | |
| 601 | RNLVVSLLNSMKSIISLLFLLFLFIVVFALLGMQLFGGQFNFDEGTPPTN | 650 |
| | \|\|\|\|\|\|\|\|\|\|\|\|\|\|\|\|\|\|\|\|\|\|\|\|\|\|\|\|\|\|\|\|\|\|\|\|\|\|\|\|\|\|\|\|\|\|\|\|\|\| | |
| 601 | RNLVVSLLNSMKSIISLLFLLFLFIVVFALLGMQLFGGQFNFDEGTPPTN | 650 |
| | . . . . . | |
| 651 | FDTFPAAIMTVFQILTGEDWNEVMYDGIKSQGGVQGGMVFSIYFIVLTLF | 700 |
| | \|\|\|\|\|\|\|\|\|\|\|\|\|\|\|\|\|\|\|\|\|\|\|\|\|\|\|\|\|\|\|\|\|\|\|\|\|\|\|\|\|\|\|\|\|\|\|\|\|\| | |
| 651 | FDTFPAAIMTVFQILTGEDWNEVMYDGIKSQGGVQGGMVFSIYFIVLTLF | 700 |
| | . . . . . | |
| 701 | GNYTLLNVFLAIAVDNLANAQELTKDEQEEEEAANQKLALQKAKEVAEVS | 750 |
| | \|\|\|\|\|\|\|\|\|\|\|\|\|\|\|\|\|\|\|\|\|\|\|\|\|\|\|\|\|\|\|\|\|\|\|\|\|\|\|\|\|\|\|\|\|\|\|\|\|\| | |
| 701 | GNYTLLNVFLAIAVDNLANAQELTKDEQEEEEAANQKLALQKAKEVAEVS | 750 |
| | . . . . . | |
| 751 | PLSAANMSIAVKEQQKNQKPAKSVWEQRTSEMRKQNLLASREALYNEMDP | 800 |
| | \|\|\|\|\|\|\|\|\|\|\|\|\|\|\|\|\|\|\|\|\|\|\|\|\|\|\|\|\|\|\|\|\|\|\|\|\|\|\|\|\|\|\|\|\|\|\|\|\|\| | |
| 751 | PLSAANMSIAVKEQQKNQKPAKSVWEQRTSEMRKQNLLASREALYNEMDP | 800 |
| | . . . . . | |
| 801 | DERWKAAYTRHLRPDMKTHLDRPLVVDPQENRNNNTNKSRAAEPTVDQRL | 850 |
| | \|\|\|\|\|\|\|\|\|\|\|\|\|\|\|\|\|\|\|\|\|\|\|\|\|\|\|\|\|\|\|\|\|\|\|\|\|\|\|\|\|\|\|\|\|\|\|\|\|\| | |
| 801 | DERWKAAYTRHLRPDMKTHLDRPLVVDPQENRNNNTNKSRAAEPTVDQRL | 850 |
| | . . . . . | |
| 851 | GQQRAEDFLRKQARYHDRARDPSGSAGLDARRPWAGSQEAELSREGPYGR | 900 |
| | \|\|\|\|\|\|\|\|\|\|\|\|\|\|\|\|\|\|\|\|\|\|\|\|\|\|\|\|\|\|\|\|\|\|\|\|\|\|\|\|\|\|\|\|\|\|\|\|\|\| | |
| 851 | GQQRAEDFLRKQARYHDRARDPSGSAGLDARRPWAGSQEAELSREGPYGR | 900 |
| | . . . . . | |
| 901 | ESDHHAREGSLEQPGFWEGEAERGKAGDPHRRHVHRQGGSRESRSGSPRT | 950 |
| | \|\|\|\|\|\|\|\|\|\|\|\|\|\|\|\|\|\|\|\|\|\|\|\|\|\|\|\|\|\|\|\|\|\|\|\|\|\|\|\|\|\|\|\|\|\|\|\|\|\| | |
| 901 | ESDHHAREGSLEQPGFWEGEAERGKAGDPHRRHVHRQGGSRESRSGSPRT | 950 |
| | . . . . . | |
| 951 | GADGEHRRHRAHRRPGEEGPEDKAERRARHREGSRPARGGEGEGEGPDGG | 1000 |
| | \|\|\|\|\|\|\|\|\|\|\|\|\|\|\|\|\|\|\|\|\|\|\|\|\|\|\|\|\|\|\|\|\|\|\|\|\|\|\|\|\|\|\|\|\|\|\|\|\|\| | |
| 951 | GADGEHRRHRAHRRPGEEGPEDKAERRARHREGSRPARGGEGEGEGPDGG | 1000 |
| | . . . . . | |
| 1001 | ERRRRHRHGAPATYEGDARREDKERRHRRRKENQGSGVPVSGPNLSTTRP | 1050 |
| | \|\|\|\|\|\|\|\|\|\|\|\|\|\|\|\|\|\|\|\|\|\|\|\|\|\|\|\|\|\|\|\|\|\|\|\|\|\|\|\|\|\|\|\|\|\|\|\|\|\| | |
| 1001 | ERRRRHRHGAPATYEGDARREDKERRHRRRKENQGSGVPVSGPNLSTTRP | 1050 |
| | . . . . . | |
| 1051 | IQQDLGRQDPPLAEDIDNMKNNKLATAESAAPHGSLGHAGLPQSPAKMGN | 1100 |
| | \|\|\|\|\|\|\|\|\|\|\|\|\|\|\|\|\|\|\|\|\|\|\|\|\|\|\|\|\|\|\|\|\|\|\|\|\|\|\|\|\|\|\|\|\|\|\|\|\|\| | |
| 1051 | IQQDLGRQDPPLAEDIDNMKNNKLATAESAAPHGSLGHAGLPQSPAKMGN | 1100 |
| | . . . . . | |
| 1101 | STDPGPMLAIPAMATNPQNAASRRTPNNPGNPSNPGPPKTPENSLIVTNP | 1150 |
| | \|\|\|\|\|\|\|\|\|\|\|\|\|\|\|\|\|\|\|\|\|\|\|\|\|\|\|\|\|\|\|\|\|\|\|\|\|\|\|\|\|\|\|\|\|\|\|\|\|\| | |
| 1101 | STDPGPMLAIPAMATNPQNAASRRTPNNPGNPSNPGPPKTPENSLIVTNP | 1150 |
| | . . . . . | |
| 1151 | SGTQTNSAKTARKPDHTTVDIPPACPPPLNHTVVQVNKNANPDPLPKKEE | 1200 |
| | \|\|\|\|\|\|\|\|\|\|\|\|\|\|\|\|\|\|\|\|\|\|\|\|\|\|\|\|\|\|\|\|\|\|\|\|\|\|\|\|\|\|\|\|\|\|\|\|\|\| | |
| 1151 | SGTQTNSAKTARKPDHTTVDIPPACPPPLNHTVVQVNKNANPDPLPKKEE | 1200 |
| | . . . . . | |
| 1201 | EKKEEEEDDRGEDGPKPMPPYSSMFILSTTNPLRRLCHYILNLRYFEMCI | 1250 |
| | \|\|\|\|\|\|\|\|\|\|\|\|\|\|\|\|\|\|\|\|\|\|\|\|\|\|\|\|\|\|\|\|\|\|\|\|\|\|\|\|\|\|\|\|\|\|\|\|\|\| | |
| 1201 | EKKEEEEDDRGEDGPKPMPPYSSMFILSTTNPLRRLCHYILNLRYFEMCI | 1250 |
| | . . . . . | |
| 1251 | LMVIAMSSIALAAEDPVQPNAPRNNVLRYFDYVFTGVFTFEMVIKMIDLG | 1300 |
| | \|\|\|\|\|\|\|\|\|\|\|\|\|\|\|\|\|\|\|\|\|\|\|\|\|\|\|\|\|\|\|\|\|\|\|\|\|\|\|\|\|\|\|\|\|\|\|\|\|\| | |
| 1251 | LMVIAMSSIALAAEDPVQPNAPRNNVLRYFDYVFTGVFTFEMVIKMIDLG | 1300 |
| | . . . . . | |
| 1301 | LVLHQGAYFRDLWNILDFIVVSGALVAFAFTGNSKGKDINTIKSLRVLRV | 1350 |
| | \|\|\|\|\|\|\|\|\|\|\|\|\|\|\|\|\|\|\|\|\|\|\|\|\|\|\|\|\|\|\|\|\|\|\|\|\|\|\|\|\|\|\|\|\|\|\|\|\|\| | |
| 1301 | LVLHQGAYFRDLWNILDFIVVSGALVAFAFTGNSKGKDINTIKSLRVLRV | 1350 |
| | . . . . . | |
| 1351 | LRPLKTIKRLPKLKAVFDCVVNSLKNVFNILIVYMLFMFIFAVVAVQLFK | 1400 |
| | \|\|\|\|\|\|\|\|\|\|\|\|\|\|\|\|\|\|\|\|\|\|\|\|\|\|\|\|\|\|\|\|\|\|\|\|\|\|\|\|\|\|\|\|\|\|\|\|\|\| | |
| 1351 | LRPLKTIKRLPKLKAVFDCVVNSLKNVFNILIVYMLFMFIFAVVAVQLFK | 1400 |
| | . . . . . | |
| 1401 | GKFFHCTDESKEFEKDCRGKYLLYEKNEVKARDREWKKYEFHYDNVLWAL | 1450 |
| | \|\|\|\|\|\|\|\|\|\|\|\|\|\|\|\|\|\|\|\|\|\|\|\|\|\|\|\|\|\|\|\|\|\|\|\|\|\|\|\|\|\|\|\|\|\|\|\|\|\| | |
| 1401 | GKFFHCTDESKEFEKDCRGKYLLYEKNEVKARDREWKKYEFHYDNVLWAL | 1450 |
| | . . . . . | |
| 1451 | LTLFTVSTGEGWPQVLKHSVDATFENQGPSPGYRMEMSIFYVVYFVVFPF | 1500 |
| | \|\|\|\|\|\|\|\|\|\|\|\|\|\|\|\|\|\|\|\|\|\|\|\|\|\|\|\|\|\|\|\|\|\|\|\|\|\|\|\|\|\|\|\|\|\|\|\|\|\| | |
| 1451 | LTLFTVSTGEGWPQVLKHSVDATFENQGPSPGYRMEMSIFYVVYFVVFPF | 1500 |
| | . . . . . | |
| 1501 | FFVNIFVALIIITFQEQGDKMMEEYSLEKNERACIDFAISAKPLTRHMPQ | 1550 |
| | \|\|\|\|\|\|\|\|\|\|\|\|\|\|\|\|\|\|\|\|\|\|\|\|\|\|\|\|\|\|\|\|\|\|\|\|\|\|\|\|\|\|\|\|\|\|\|\|\|\| | |
| 1501 | FFVNIFVALIIITFQEQGDKMMEEYSLEKNERACIDFAISAKPLTRHMPQ | 1550 |
| | . . . . . | |
| 1551 | NKQSFQYRMWQFVVSPPFEYTIMAMIALNTIVLMMKFYGASVAYENALRV | 1600 |
| | \|\|\|\|\|\|\|\|\|\|\|\|\|\|\|\|\|\|\|\|\|\|\|\|\|\|\|\|\|\|\|\|\|\|\|\|\|\|\|\|\|\|\|\|\|\|\|\|\|\| | |
| 1551 | NKQSFQYRMWQFVVSPPFEYTIMAMIALNTIVLMMKFYGASVAYENALRV | 1600 |
| | . . . . . | |
| 1601 | FNIVFTSLFSLECVLKVMAFGILNYFRDAWNIFDFVTVLGSITDILVTEF | 1650 |
| | \|\|\|\|\|\|\|\|\|\|\|\|\|\|\|\|\|\|\|\|\|\|\|\|\|\|\|\|\|\|\|\|\|\|\|\|\|\|\|\|\|\|\|\|\|\|\|\|\|\| | |
| 1601 | FNIVFTSLFSLECVLKVMAFGILNYFRDAWNIFDFVTVLGSITDILVTEF | 1650 |
| | . . . . . | |
| 1651 | GNNFINLSFLRLFRAARLIKLLRQGYTIRILLWTFVQSFKALPYVCLLIA | 1700 |
| | \|\|\|\|\|\|\|\|\|\|\|\|\|\|\|\|\|\|\|\|\|\|\|\|\|\|\|\|\|\|\|\|\|\|\|\|\|\|\|\|\|\|\|\|\|\|\|\|\|\| | |
| 1651 | GNNFINLSFLRLFRAARLIKLLRQGYTIRILLWTFVQSFKALPYVCLLIA | 1700 |
| | . . . . . | |
| 1701 | MLFFIYAIIGMQVFGNIGIDVEDEDSDEDEFQITEHNNFRTFFQALMLLF | 1750 |
| | \|\|\|\|\|\|\|\|\|\|\|\|\|\|\|\|\|\|\|\|\|\|\|\|\|\|\|\|\|\|\|\|\|\|\|\|\|\|\|\|\|\|\|\|\|\|\|\|\|\| | |
| 1701 | MLFFIYAIIGMQVFGNIGIDVEDEDSDEDEFQITEHNNFRTFFQALMLLF | 1750 |
| | . . . . . | |
| 1751 | RSATGEAWHNIMLSCLSGKPCDKNSGILTRECGNEFAYFYFVSFIFLCSF | 1800 |
| | \|\|\|\|\|\|\|\|\|\|\|\|\|\|\|\|\|\|\|\|\|\|\|\|\|\|\|\|\|\|\|\|\|\|\|\|\|\|\|\|\|\|\|\|\|\|\|\|\|\| | |
| 1751 | RSATGEAWHNIMLSCLSGKPCDKNSGILTRECGNEFAYFYFVSFIFLCSF | 1800 |
| | . . . . . | |
| 1801 | LMLNLFVAVIMDNFEYLTRDSSILGPHHLDEYVRVWAEYDPAA....... | 1843 |
| | \|\|\|\|\|\|\|\|\|\|\|\|\|\|\|\|\|\|\|\|\|\|\|\|\|\|\|\|\|\|\|\|\|\|\|\|\|\|\|\|\|\|\| | |
| 1801 | LMLNLFVAVIMDNFEYLTRDSSILGPHHLDEYVRVWAEYDPAAWGRMPYL | 1850 |
| | . . . . . | |
| 1844 | .........................CGRIHYKDMYSLLRVISPPLG | 1864 |
| 1851 | DMYQMLRHMSPPLGLGKKCPARVAY..................... | 1875 |
| | . . . . . | |
| 1865 | LGKKCPHRVACKRLLRMDLPVADDNTVHFNSTLMALIRTALDIKIAKGGA | 1914 |
| | \|\|\|\|\|\|\|\|\|\|\|\|\|\|\|\|\|\|\|\|\|\|\|\|\|\|\|\|\|\|\|\|\|\|\|\|\|\|\| | |
| 1876 | ...........KRLLRMDLPVADDNTVHFNSTLMALIRTALDIKIAKGGA | 1914 |
| | . . . . . | |
| 1915 | DKQQMDAELRKEMMAIWPNLSQKTLDLLVTPHKSTDLTVGKIYAAMMIME | 1964 |
| | \|\|\|\|\|\|\|\|\|\|\|\|\|\|\|\|\|\|\|\|\|\|\|\|\|\|\|\|\|\|\|\|\|\|\|\|\|\|\|\|\|\|\|\|\|\|\|\|\|\| | |
| 1915 | DKQQMDAELRKEMMAIWPNLSQKTLDLLVTPHKSTDLTVGKIYAAMMIME | 1964 |
| | . . . . . | |
| 1965 | YYRQSKAKKLQAMREEQDRTPLMFQRMEPPSPTQEGGPGQNALPSTQLDP | 2014 |
| | \|\|\|\|\|\|\|\|\|\|\|\|\|\|\|\|\|\|\|\|\|\|\|\|\|\|\|\|\|\|\|\|\|\|\|\|\|\|\|\|\|\|\|\|\|\|\|\|\|\| | |
| 1965 | YYRQSKAKKLQAMREEQDRTPLMFQRMEPPSPTQEGGPGQNALPSTQLDP | 2014 |
| | . . . . . | |
| 2015 | GGALMAHESGLKESPSWVTQRAQEMFQKTGTWSPEQGPPTDMPNSQPNSQ | 2064 |
| | \|\|\|\|\|\|\|\|\|\|\|\|\|\|\|\|\|\|\|\|\|\|\|\|\|\|\|\|\|\|\|\|\|\|\|\|\|\|\|\|\|\|\|\|\|\|\|\|\|\| | |
| 2015 | GGALMAHESGLKESPSWVTQRAQEMFQKTGTWSPEQGPPTDMPNSQPNSQ | 2064 |
| | . . . . . | |
| 2065 | SVEMREMGRDGYSDSEHYLPMEGQGRAASMPRLPAENQRRRGRPRGNNLS | 2114 |
| | \|\|\|\|\|\|\|\|\|\|\|\|\|\|\|\|\|\|\|\|\|\|\|\|\|\|\|\|\|\|\|\|\|\|\|\|\|\|\|\|\|\|\|\|\|\|\|\|\|\| | |
| 2065 | SVEMREMGRDGYSDSEHYLPMEGQGRAASMPRLPAENQRRRGRPRGNNLS | 2114 |
| | . . . . . | |
| 2115 | TISDTSPMKRSASVLGPKARRLDDYSLERVPPEENQRHHQRRRDRSHRAS | 2164 |
| | \|\|\|\|\|\|\|\|\|\|\|\|\|\|\|\|\|\|\|\|\|\|\|\|\|\|\|\|\|\|\|\|\|\|\|\|\|\|\|\|\|\|\|\|\|\|\|\|\|\| | |
| 2115 | TISDTSPMKRSASVLGPKARRLDDYSLERVPPEENQRHHQRRRDRSHRAS | 2164 |
| | . . . . . | |
| 2165 | ERSLGRYTDVDTGLGTDLSMTTQSGDLPSKERDQERGRPKDRKHRQHHHH | 2214 |
| | \|\|\|\|\|\|\|\|\|\|\|\|\|\|\|\|\|\|\|\|\|\|\|\|\|\|\|\|\|\|\|\|\|\|\|\|\|\|\|\|\|\|\|\|\|\|\|\|\|\| | |
| 2165 | ERSLGRYTDVDTGLGTDLSMTTQSGDLPSKERDQERGRPKDRKHRQHHHH | 2214 |
| | . . . . . | |
| 2215 | HHHHHHPPPPDKDRYAQERPDHGRARARDQRWSRSPSEGREHMAHRQGSS | 2264 |
| | \|\|\|\|\|\|\|\|\|\|\|\|\|\|\|\|\|\|\|\|\|\|\|\|\|\|\|\|\|\|\|\|\|\|\|\|\|\|\|\|\|\|\|\|\|\|\|\|\|\| | |
| 2215 | HHHHHHPPPPDKDRYAQERPDHGRARARDQRWSRSPSEGREHMAHRQGSS | 2264 |
| | . . . . . | |
| 2265 | SVSGSPAPSTSGTSTPRRGRRQLPQTPSTPRPHVSYSPVIRKAGGSGPRQ | 2314 |
| | \|\|\|\|\|\|\|\|\|\|\|\|\|\|\|\|\|\|\|\|\|\|\|\|\|\|\|\|\|\|\|\|\|\|\|\|\|\|\|\|\|\|\|\|\|\|\|\|\|\| | |
| 2265 | SVSGSPAPSTSGTSTPRRGRRQLPQTPSTPRPHVSYSPVIRKAGGSGP.. | 2312 |
| | . . . . . | |
| 2315 | QQQQQQQQQHSSSSSSSSSSSRRWPGRAGRPPAALGGTQAPRPSLWPEIG | 2364 |
| 2312 | .................................................. | 2312 |
| | . . . . . | |
| 2365 | RPRGATAAAARPGWRGGSQARPGASPPGPVDTAGPGGRHLARTCPRGPRV | 2414 |
| 2312 | .................................................. | 2312 |
| | . . . . . | |
| 2415 | PGTMATTGAPTTTRPMARAAGAARRPWPGPTTRHPPYDTRPRAPPGARPG | 2464 |
| 2312 | .................................................. | 2312 |
| | . . . . . | |
| 2465 | LPGPRARPAPRLLGTAGDSPTATTRRTDWPGPAGRAPGRACTNPTARVTM | 2514 |
| 2312 | .................................................. | 2312 |
| | . . . . . | |
| 2515 | IGAKPGRGGARPAPHAPHAHTPPEEPRRGRGGPAQRARERASRETPDSGE | 2564 |
| 2312 | .................................................. | 2312 |
| | . . . . . | |
| 2565 | ARAGPQGCPAETLGQKRPSWAATAPPNQPRSPHPRQGLSGGRQGADKPHS | 2614 |
| 2312 | .................................................. | 2312 |
| 2615 | QGI | 2617 |
| 2312 | ... | 2312 |

### EXAMPLE 5

[0224] This Example relates to the variant T59742_P4 (SEQ ID NO:12; the nucleic acid sequence is given by SEQ ID NO:34), which is a variant alpha 1 subunit according to the present invention, and more specifically, is a splice variant of the known protein CCAA_HUMAN. The known protein structure and function is described above in Example 2.

[0225] The structure of the splice variant according to the present invention features a unique head, a unique insertion, a skipped exon and a unique tail, as compared to the known protein sequence. An alignment is provided at the end of this section, while the comparison between the two sequences is described below.

[0226] According to preferred embodiments of the present invention, there is provided an isolated chimeric polypeptide encoding for T59742_P4, comprising a first amino acid sequence being at least 70%, optionally at least 80%, preferably at least 85%, more preferably at least 90% and most preferably at least 95% homologous to a polypeptide having the sequence (SEQ ID NO: 75) MSSWPTRPTKSTAPPRPGGKNGT corresponding to amino acids 1-23 of T59742_P4, a second amino acid sequence being at least 90% homologous to (SEQ ID NO: 76) TIIANCIVLALEQHLPDDDKTPMSERLDDTEPYFIGIFCFEAGIKIIALGFAFHKGSYLRNGWNVMDFVVVLTGILATVGTEFDLRTLRAVRVLRPLKLVSGIPSLQVVLKSIMKAMIPLLQIGLLLFFAILIFAIIGLEFYMGKFHTTCFEEGTDDIQGESPAPCGTEEPARTCPNGTKCQPYWEGPNNGITQFDNILFAVLTVFQCITMEGWTDLLYNSNDASGNTWNWLYFIPLIIIGSFFMLNLVLGVLSGEFAKERERVENRRAFLKLRRQQQIERELNGYMEWISKAEEVILAEDETDGEQRHPFDGALRRTTIKKSKTDLLNPEEAEDQLADIASVGSPFARASIKSAKLENSTFFHKKERRMRFYIRRMVKTQAFYWTVLSLVALNTLCVAIVHYNQPEWLSDFLYYAEFIFLGLFMSEMFIKMYGLGTRPYFHSSFNCFDCGVIIGSIFEVIWAVIKPGTSFGISVLRALRLLRIFKVTKYWASLRNLVVSLLNSMKSIISLLFLLFLFIVVFALLGMQLFGGQFNFDEGTPPTNFDTFPAAIMTVFQILTGEDWNEVMYDGIKSQGGVQGGMVFSIYFIVLTLFGNYTLLNVFLAIAVDNLANAQELTKDEQEEEEAANQKLALQKAKEVAEVSPLSAANMSIAVKEQQKNQKPAKSVWEQRTSEMRKQNLLASREALYNEMDPDERWKAAYTRHLRPDMKTHLDRPLVVDPQENRNNNTNKSRAAEPTVDQRLGQQRAEDFLRKQARYHDRARDPSGSAGLDARRPWAGSQEAELSREGPYGRESDHHAREGSLEQPGFWEGEAERGKAGDPHRRHVHRQGGSRESRSGSPRTGADGEHRRHRAHRRPGEEGPEDKAERRARHREGSRPARGGEGEGEGPDGGERRRRHRHGAPATYEGDARREDKERRHRRRKENQGSGVPVSGPNLSTTRPIQQDLGRQDPPLAEDIDNMKNNKLATAESAAPHGSLGHAGLPQSPAKMGNSTDPGPMLAIPAMATNPQNAASRRTPNNPGNPSNPGPPKTPENSLIVTNPSGTQTNSAKTARKPDHTTVDIPPACPPPLNHTVVQVNKNANPDPLPKKEEEKKEEEEDDRGEDGPKPMPPYSSMFILSTTNPLRRLCHYILNLRYFEMCILMVIAMSSIALAAEDPVQPNAPRNNVLRYFDYVFTGVFTFEMVIKMIDLGLVLHQGAYFRDLWNILDFIVVSGALVAFAFTGNSKGKDINTIKSLRVLRVLRPLKTIKRLPKLKAVFDCVVNSLKNVFNILIVYMLFMFIFAVVAVQLFKGKFFHCTDESKEFEKDCRGKYLLYEKNEVKARDREWKKYEFHYDNVLWALLTLFTVSTGEGWPQVLKHSVDATFENQGPSPGYRMEMSIFYVVYFVVFPFFFVNIFVALIIITFQEQGDKMMEEYSLEKNERACIDFAISAKPLTRHMPQNKQSFQYRMWQFVVSPPFEYTIMAMIALNTIVLMMKFYGASVAYENALRVFNIVFTSLFSLECVLKVMAFGILNYFRDAWNIFDFVTVLGSITDILVTEFGNNFINLSFLRLFRAARLIKLLRQGYTIRILLWTFVQSFKALPYVCLLIAMLFFIYAIIGMQVFGNIGIDVEDEDSDEDEFQITEHNNFRTFFQALMLLFRSATGEAWHNIMLSCLSGKPCDKNSGILTRECGNEFAYFYFVSFIFLCSFLMLNLFVAVIMDNFEYLTRDSSILGPHHLDEYVRVWAEYDPAA corresponding to amino acids 107-1843 of CCAA_HUMAN, which also corresponds to amino acids 24-1760 of T59742_P4, a third amino acid sequence being at least 70%, optionally at least 80%, preferably at least 85%, more preferably at least 90% and most preferably at least 95% homologous to a polypeptide having the sequence (SEQ ID NO: 77) CGRIHYKDMYSLLRVISPPLGLGKKCPHRVAC corresponding to amino acids 1761-1792 of T59742_P4, a fourth amino acid sequence being at least 90% homologous to (SEQ ID NO: 78) KRLLRMDLPVADDNTVHFNSTLMALIRTALDIKIAKGGADKQQMDAELRKEMMAIWPNLSQKTLDLLVTPHKSTDLTVGKIYAAMMIMEYYRQSKAKKLQAMREEQDRTPLMFQRMEPPSPTQEGGPGQNALPSTQLDPGGALMAHESGLKESPSWVTQRAQEMFQKTGTWSPEQGPPTDMPNSQPNSQSVEMREMGRDGYSDSEHYLPMEGQGRAASMPRLPAENQ corresponding to amino acids 1876-2102 of CCAA_HUMAN, which also corresponds to amino acids 1793-2019 of T59742_P4, 10th amino acid sequence being at least 90% homologous to (SEQ ID NO: 79) TISDTSPMKRSASVLGPKARRLDDYSLERVPPEENQRHHQRRRDRSHRASERSLGRYTDVDTGLGTDLSMTTQSGDLPSKERDQERGRPKDRKHRQHHHHHHHHHHPPPPDKDRYAQERPDHGRARARDQRWSRSPSEGREHMAHRQGSSSVSGSPAPSTSGTSTPRRGRRQLPQTPSTPRPHVSYSPVIRKAGGSGP corresponding to amino acids 2115-2312 of CCAA_HUMAN, which also corresponds to amino acids 2020-2217 of T59742_P4 and a fifth amino acid sequence being at least 70%, optionally at least 80%, preferably at least 85%, more preferably at least 90% and most preferably at least 95% homologous to a polypeptide having the sequence (SEQ ID NO: 80) RSSSSSSSSSSSRRWPGRAGRPPAALGGTQAPRPSLWPEIGRPRGATAAAARPGWRGGSQARPGASPPGPVDTAGPGGRHLARTCPRGPRVPGTMATTGAPTTTRPMARAAGAARRPWPGPTTRHPPYDTRPRAPPGARPGLPGPRARPAPRLLGTAGDSPTATTRRTDWPGPAGRAPGRACTNPTARVTMIGAKPGRGGARPAPHAPHAHTPPEEPRRGRGGPAQRARERASRETPDSGEARAGPQGCPAETLGQKRPSWAATAPPNQPRSPHPRQGLSGGRQGADKPHSQGI corresponding to amino acids 2218-2511 of T59742_P4, wherein said first amino acid sequence, second amino acid sequence, third amino acid sequence, fourth amino acid sequence and fifth amino acid sequence are contiguous and in a sequential order.

[0227] According to preferred embodiments of the present invention, there is provided an isolated polypeptide encoding for a head of T59742_P4, comprising a polypeptide being at least 70%, optionally at least about 80%, preferably at least about 85%, more preferably at least about 90% and most preferably at least about 95% homologous to the sequence (SEQ ID NO: 81) MSSWPTRPTKSTAPPRPGGKNGT of T59742_P4.

[0228] According to preferred embodiments of the present invention, there is provided an isolated chimeric polypeptide encoding for an edge portion of T59742_P4, comprising a polypeptide having a length “n”, wherein n is at least about 10 amino acids in length, optionally at least about 20 amino acids in length, preferably at least about 30 amino acids in length, more preferably at least about 40 amino acids in length and most preferably at least about 50 amino acids in length, wherein at least two amino acids comprise QT, having a structure as follows: a sequence starting from any of amino acid numbers 2019−x to 2019; and ending at any of amino acid numbers 2020+((n−2)−x), in which x varies from 0 to n−2.

[0229] According to preferred embodiments of the present invention, there is provided an isolated polypeptide encoding for a tail of T59742_P4, comprising a polypeptide being at least 70%, optionally at least about 80%, preferably at least about 85%, more preferably at least about 90% and most preferably at least about 95% homologous to the sequence (SEQ ID NO: 82) RSSSSSSSSSSSRRWPGRAGRPPAALGGTQAPRPSLWPEIGRPRGATAAAARPGWRGGSQARPGASPPGPVDTAGPGGRHLARTCPRGPRVPGTMATTGAPTTTRPMARAAGAARRPWPGPTTRHPPYDTRPRAPPGARPGLPGPRARPAPRLLGTAGDSPTATTRRTDWPGPAGRAPGRACTNPTARVTMIGAKPGRGGARPAPHAPHAHTPPEEPRRGRGGPAQRARERASRETPDSGEARAGPQGCPAETLGQKRPSWAATAPPNQPRSPHPRQGLSGGRQGADKPHSQGI in T59742_P4.

[0230] According to preferred embodiments of the present invention, there is provided an isolated polypeptide encoding for a unique insertion of T59742_P4, comprising a polypeptide being at least 70%, optionally at least about 80%, preferably at least about 85%, more preferably at least about 90% and most preferably at least about 95% homologous to the sequence (SEQ ID NO: 83) CGRIHYKDMYSLLRVISPPLGLGKKCPHRVAC in T59742_P4.

[0231] Domains affected by alternative splicing include the cytoplasmic N-terminus region of the protein; the S1 transmembrane domain of domain I and the cytoplasmic C-terminus region of the protein.

[0232] The effects on the C-terminal regions of this alpha 1 subunit type are described above with regard to Example 2.

[0233] From the above description of the effect of changes to the C-terminus domain of this variant, it is expected that the variant has a greater current amplitude as compared to the known protein, and a stronger calcium dependence of inactivation.

[0234] In addition, since there is a change in the calcium-binding region (comparing to swissprot annotation), it is expected that the calcium binding characteristics of the resultant channel will differ from those of the known protein.

Sequence name: CCAA_HUMAN

documentation:

of: T59742_P4 (SEQ ID NO: 12)×CCAA_HUMAN (SEQ ID NO: 84). . .

segment 1/1:

[0235] Quality: 2108.00

Escore: 0

Matching lenth: 2158 Total

length: 2559

Matching Percent Similarity: 100.00 Matching Percent

Identity: 100.00

Total Percent Similarity: 84.33 Total Percent

Identity: 84.33

[0236] Gaps: 5

[0237] Alignment:

| | . . . . . | |
|---|---|---|
| 1 | MSSWPTRPTKSTAPPRPGGKNGTTIIANCIVLALEQHLPDDDKTPMSERL | 50 |
| | \|\|\|\|\|\|\|\|\|\|\|\|\|\|\|\|\|\|\|\|\|\|\|\|\|\|\| | |
| 107 | .......................TIIANCIVLALEQHLPDDDKTPMSERL | 133 |
| | . . . . . | |
| 51 | DDTEPYFIGIFCFEAGIKIIALGFAFHKGSYLRNGWNVMDFVVVLTGILA | 100 |
| | \|\|\|\|\|\|\|\|\|\|\|\|\|\|\|\|\|\|\|\|\|\|\|\|\|\|\|\|\|\|\|\|\|\|\|\|\|\|\|\|\|\|\|\|\|\|\|\|\|\| | |
| 134 | DDTEPYFIGIFCFEAGIKIIALGFAFHKGSYLRNGWNVMDFVVVLTGILA | 183 |
| | . . . . . | |
| 101 | TVGTEFDLRTLRAVRVLRPLKLVSGIPSLQVVLKSIMKAMIPLLQIGLLL | 150 |
| | \|\|\|\|\|\|\|\|\|\|\|\|\|\|\|\|\|\|\|\|\|\|\|\|\|\|\|\|\|\|\|\|\|\|\|\|\|\|\|\|\|\|\|\|\|\|\|\|\|\| | |
| 184 | TVGTEFDLRTLRAVRVLRPLKLVSGIPSLQVVLKSIMKAMIPLLQIGLLL | 233 |
| | . . . . . | |
| 151 | FFAILIFAIIGLEFYMGKFHTTCFEEGTDDIQGESPAPCGTEEPARTCPN | 200 |
| | \|\|\|\|\|\|\|\|\|\|\|\|\|\|\|\|\|\|\|\|\|\|\|\|\|\|\|\|\|\|\|\|\|\|\|\|\|\|\|\|\|\|\|\|\|\|\|\|\|\| | |
| 234 | FFAILIFAIIGLEFYMGKFHTTCFEEGTDDIQGESPAPCGTEEPARTCPN | 283 |
| | . . . . . | |
| 201 | GTKCQPYWEGPNNGITQEDNILFAVLTVFQCITMEGWTDLLYNSNDASGN | 250 |
| | \|\|\|\|\|\|\|\|\|\|\|\|\|\|\|\|\|\|\|\|\|\|\|\|\|\|\|\|\|\|\|\|\|\|\|\|\|\|\|\|\|\|\|\|\|\|\|\|\|\| | |
| 284 | GTKCQPYWEGPNNGITQFDNILFAVLTVFQCITMEGWTDLLYNSNDASGN | 333 |
| | . . . . . | |
| 251 | TWNWLYFIPLIIIGSFFMLNLVLGVLSGEFAKERERVENRRAFLKLRRQQ | 300 |
| | \|\|\|\|\|\|\|\|\|\|\|\|\|\|\|\|\|\|\|\|\|\|\|\|\|\|\|\|\|\|\|\|\|\|\|\|\|\|\|\|\|\|\|\|\|\|\|\|\|\| | |
| 334 | TWNWLYFIPLIIIGSFFMLNLVLGVLSGEFAKERERVENRRAFLKLRRQQ | 383 |
| | . . . . . | |
| 301 | QIERELNGYMEWISKAEEVILAEDETDGEQRHPFDGALRRTTIKKSKTDL | 350 |
| | \|\|\|\|\|\|\|\|\|\|\|\|\|\|\|\|\|\|\|\|\|\|\|\|\|\|\|\|\|\|\|\|\|\|\|\|\|\|\|\|\|\|\|\|\|\|\|\|\|\| | |
| 384 | QIERELNGYMEWISKAEEVILAEDETDGEQRHPFDGALRRTTIKKSKTDL | 433 |
| | . . . . . | |
| 351 | LNPEEAEDQLADIASVGSPFARASIKSAKLENSTFFHKKERRMRFYIRRM | 400 |
| | \|\|\|\|\|\|\|\|\|\|\|\|\|\|\|\|\|\|\|\|\|\|\|\|\|\|\|\|\|\|\|\|\|\|\|\|\|\|\|\|\|\|\|\|\|\|\|\|\|\| | |
| 434 | LNPEEAEDQLADIASVGSPFARASIKSAKLENSTFFHKKERRMRFYIRRM | 483 |
| | . . . . . | |
| 401 | VKTQAFYWTVLSLVALNTLCVAIVHYNQPEWLSDFLYYAEFIFLGLFMSE | 450 |
| | \|\|\|\|\|\|\|\|\|\|\|\|\|\|\|\|\|\|\|\|\|\|\|\|\|\|\|\|\|\|\|\|\|\|\|\|\|\|\|\|\|\|\|\|\|\|\|\|\|\| | |
| 484 | VKTQAFYWTVLSLVALNTLCVAIVHYNQPEWLSDFLYYAEFIFLGLFMSE | 533 |
| | . . . . . | |
| 451 | MFIKMYGLGTRPYFHSSFNCFDCGVIIGSIFEVIWAVIKPGTSFGISVLR | 500 |
| | \|\|\|\|\|\|\|\|\|\|\|\|\|\|\|\|\|\|\|\|\|\|\|\|\|\|\|\|\|\|\|\|\|\|\|\|\|\|\|\|\|\|\|\|\|\|\|\|\|\| | |
| 534 | MFIKMYGLGTRPYFHSSFNCFDCGVIIGSIFEVIWAVIKPGTSFGISVLR | 583 |
| | . . . . . | |
| 501 | ALRLLRIFKVTKYWASLRNLVVSLLNSMKSIISLLFLLFLFIVVFALLGM | 550 |
| | \|\|\|\|\|\|\|\|\|\|\|\|\|\|\|\|\|\|\|\|\|\|\|\|\|\|\|\|\|\|\|\|\|\|\|\|\|\|\|\|\|\|\|\|\|\|\|\|\|\| | |
| 584 | ALRLLRIFKVTKYWASLRNLVVSLLNSMKSIISLLFLLFLFIVVFALLGM | 633 |
| | . . . . . | |
| 551 | QLFGGQFNFDEGTPPTNFDTFPAAIMTVFQILTGEDWNEVMYDGIKSQGG | 600 |
| | \|\|\|\|\|\|\|\|\|\|\|\|\|\|\|\|\|\|\|\|\|\|\|\|\|\|\|\|\|\|\|\|\|\|\|\|\|\|\|\|\|\|\|\|\|\|\|\|\|\| | |
| 634 | QLFGGQFNFDEGTPPTNFDTFPAAIMTVFQILTGEDWNEVMYDGIKSQGG | 683 |
| | . . . . . | |
| 601 | VQGGMVFSIYFIVLTLFGNYTLLNVFLAIAVDNLANAQELTKDEQEEEEA | 650 |
| | \|\|\|\|\|\|\|\|\|\|\|\|\|\|\|\|\|\|\|\|\|\|\|\|\|\|\|\|\|\|\|\|\|\|\|\|\|\|\|\|\|\|\|\|\|\|\|\|\|\| | |
| 684 | VQGGMVFSIYFIVLTLFGNYTLLNVFLAIAVDNLANAQELTKDEQEEEEA | 733 |
| | . . . . . | |
| 651 | ANQKLALQKAKEVAEVSPLSAANMSIAVKEQQKNQKPAKSVWEQRTSEMR | 700 |
| | \|\|\|\|\|\|\|\|\|\|\|\|\|\|\|\|\|\|\|\|\|\|\|\|\|\|\|\|\|\|\|\|\|\|\|\|\|\|\|\|\|\|\|\|\|\|\|\|\|\| | |
| 734 | ANQKLALQKAKEVAEVSPLSAANMSIAVKEQQKNQKPAKSVWEQRTSEMR | 783 |
| | . . . . . | |
| 701 | KQNLLASREALYNEMDPDERWKAAYTRHLRPDMKTHLDRPLVVDPQENRN | 750 |
| | \|\|\|\|\|\|\|\|\|\|\|\|\|\|\|\|\|\|\|\|\|\|\|\|\|\|\|\|\|\|\|\|\|\|\|\|\|\|\|\|\|\|\|\|\|\|\|\|\|\| | |
| 784 | KQNLLASREALYNEMDPDERWKAAYTRHLRPDMKTHLDRPLVVDPQENRN | 833 |
| | . . . . . | |
| 751 | NNTNKSRAAEPTVDQRLGQQRAEDFLRKQARYHDRARDPSGSAGLDARRP | 800 |
| | \|\|\|\|\|\|\|\|\|\|\|\|\|\|\|\|\|\|\|\|\|\|\|\|\|\|\|\|\|\|\|\|\|\|\|\|\|\|\|\|\|\|\|\|\|\|\|\|\|\| | |
| 834 | NNTNKSRAAEPTVDQRLGQQRAEDFLRKQARYHDRARDPSGSAGLDARRP | 883 |
| | . . . . . | |
| 801 | WAGSQEAELSREGPYGRESDHHAREGSLEQPGFWEGEAERGKAGDPHRRH | 850 |
| | \|\|\|\|\|\|\|\|\|\|\|\|\|\|\|\|\|\|\|\|\|\|\|\|\|\|\|\|\|\|\|\|\|\|\|\|\|\|\|\|\|\|\|\|\|\|\|\|\|\| | |
| 884 | WAGSQEAELSREGPYGRESDHHAREGSLEQPGFWEGEAERGKAGDPHRRH | 933 |
| | . . . . . | |
| 851 | VHRQGGSRESRSGSPRTGADGEHRRHRAHRRPGEEGPEDKAERRARHREG | 900 |
| | \|\|\|\|\|\|\|\|\|\|\|\|\|\|\|\|\|\|\|\|\|\|\|\|\|\|\|\|\|\|\|\|\|\|\|\|\|\|\|\|\|\|\|\|\|\|\|\|\|\| | |
| 934 | VHRQGGSRESRSGSPRTGADGEHRRHRAHRRPGEEGPEDKAERRARHREG | 983 |
| | . . . . . | |
| 901 | SRPARGGEGEGEGPDGGERRRRHRHGAPATYEGDARREDKERRHRRRKEN | 950 |
| | \|\|\|\|\|\|\|\|\|\|\|\|\|\|\|\|\|\|\|\|\|\|\|\|\|\|\|\|\|\|\|\|\|\|\|\|\|\|\|\|\|\|\|\|\|\|\|\|\|\| | |
| 984 | SRPARGGEGEGEGPDGGERRRRHRHGAPATYEGDARREDKERRHRRRKEN | 1033 |
| | . . . . . | |
| 951 | QGSGVPVSGPNLSTTRPIQQDLGRQDPPLAEDIDNMKNNKLATAESAAPH | 1000 |
| | \|\|\|\|\|\|\|\|\|\|\|\|\|\|\|\|\|\|\|\|\|\|\|\|\|\|\|\|\|\|\|\|\|\|\|\|\|\|\|\|\|\|\|\|\|\|\|\|\|\| | |
| 1034 | QGSGVPVSGPNLSTTRPIQQDLGRQDPPLAEDIDNMKNNKLATAESAAPH | 1083 |
| | . . . . . | |
| 1001 | GSLGHAGLPQSPAKMGNSTDPGPMLAIPAMATNPQNAASRRTPNNPGNPS | 1050 |
| | \|\|\|\|\|\|\|\|\|\|\|\|\|\|\|\|\|\|\|\|\|\|\|\|\|\|\|\|\|\|\|\|\|\|\|\|\|\|\|\|\|\|\|\|\|\|\|\|\|\| | |
| 1084 | GSLGHAGLPQSPAKMGNSTDPGPMLAIPAMATNPQNAASRRTPNNPGNPS | 1133 |
| | . . . . . | |
| 1051 | NPGPPKTPENSLIVTNPSGTQTNSAKTARKPDHTTVDIPPACPPPLNHTV | 1100 |
| | \|\|\|\|\|\|\|\|\|\|\|\|\|\|\|\|\|\|\|\|\|\|\|\|\|\|\|\|\|\|\|\|\|\|\|\|\|\|\|\|\|\|\|\|\|\|\|\|\|\| | |
| 1134 | NPGPPKTPENSLIVTNPSGTQTNSAKTARKPDHTTVDIPPACPPPLNHTV | 1183 |
| | . . . . . | |
| 1101 | VQVNKNANPDPLPKKEEEKKEEEEDDRGEDGPKPMPPYSSMFILSTTNPL | 1150 |
| | \|\|\|\|\|\|\|\|\|\|\|\|\|\|\|\|\|\|\|\|\|\|\|\|\|\|\|\|\|\|\|\|\|\|\|\|\|\|\|\|\|\|\|\|\|\|\|\|\|\| | |
| 1184 | VQVNKNANPDPLPKKEEEKKEEEEDDRGEDGPKPMPPYSSMFILSTTNPL | 1233 |
| | . . . . . | |
| 1151 | RRLCHYILNLRYFEMCILMVIAMSSIALAAEDPVQPNAPRNNVLRYFDYV | 1200 |
| | \|\|\|\|\|\|\|\|\|\|\|\|\|\|\|\|\|\|\|\|\|\|\|\|\|\|\|\|\|\|\|\|\|\|\|\|\|\|\|\|\|\|\|\|\|\|\|\|\|\| | |
| 1234 | RRLCHYILNLRYFEMCILMVIAMSSIALAAEDPVQPNAPRNNVLRYFDYV | 1283 |
| | . . . . . | |
| 1201 | FTGVFTFEMVIKMIDLGLVLHQGAYFRDLWNILDFIVVSGALVAFAFTGN | 1250 |
| | \|\|\|\|\|\|\|\|\|\|\|\|\|\|\|\|\|\|\|\|\|\|\|\|\|\|\|\|\|\|\|\|\|\|\|\|\|\|\|\|\|\|\|\|\|\|\|\|\|\| | |
| 1284 | FTGVFTFEMVIKMIDLGLVLHQGAYFRDLWNILDFIVVSGALVAFAFTGN | 1333 |
| | . . . . . | |
| 1251 | SKGKDINTIKSLRVLRVLRPLKTIKRLPKLKAVFDCVVNSLKNVFNILIV | 1300 |
| | \|\|\|\|\|\|\|\|\|\|\|\|\|\|\|\|\|\|\|\|\|\|\|\|\|\|\|\|\|\|\|\|\|\|\|\|\|\|\|\|\|\|\|\|\|\|\|\|\|\| | |
| 1334 | SKGKDINTIKSLRVLRVLRPLKTIKRLPKLKAVFDCVVNSLKNVFNILIV | 1383 |
| | . . . . . | |
| 1301 | YMLFMFIFAVVAVQLFKGKFFHCTDESKEFEKDCRGKYLLYEKNEVKARD | 1350 |
| | \|\|\|\|\|\|\|\|\|\|\|\|\|\|\|\|\|\|\|\|\|\|\|\|\|\|\|\|\|\|\|\|\|\|\|\|\|\|\|\|\|\|\|\|\|\|\|\|\|\| | |
| 1384 | YMLFMFIFAVVAVQLFKGKFFHCTDESKEFEKDCRGKYLLYEKNEVKARD | 1433 |
| | . . . . . | |
| 1351 | REWKKYEFHYDNVLWALLTLFTVSTGEGWPQVLKHSVDATFENQGPSPGY | 1400 |
| | \|\|\|\|\|\|\|\|\|\|\|\|\|\|\|\|\|\|\|\|\|\|\|\|\|\|\|\|\|\|\|\|\|\|\|\|\|\|\|\|\|\|\|\|\|\|\|\|\|\| | |
| 1434 | REWKKYEFHYDNVLWALLTLFTVSTGEGWPQVLKHSVDATFENQGPSPGY | 1483 |
| | . . . . . | |
| 1401 | RMEMSIFYVVYFVVFPFFFVNIFVALIIITFQEQGDKMMEEYSLEKNERA | 1450 |
| | \|\|\|\|\|\|\|\|\|\|\|\|\|\|\|\|\|\|\|\|\|\|\|\|\|\|\|\|\|\|\|\|\|\|\|\|\|\|\|\|\|\|\|\|\|\|\|\|\|\| | |
| 1484 | RMEMSIFYVVYFVVFPFFFVNIFVALIIITFQEQGDKMMEEYSLEKNERA | 1533 |
| | . . . . . | |
| 1451 | CIDFAISAKPLTRHMPQNKQSFQYRMWQFVVSPPFEYTIMAMIALNTIVL | 1500 |
| | \|\|\|\|\|\|\|\|\|\|\|\|\|\|\|\|\|\|\|\|\|\|\|\|\|\|\|\|\|\|\|\|\|\|\|\|\|\|\|\|\|\|\|\|\|\|\|\|\|\| | |
| 1534 | CIDFAISAKPLTRHMPQNKQSFQYRMWQFVVSPPFEYTIMAMIALNTIVL | 1583 |
| | . . . . . | |
| 1501 | MMKFYGASVAYENALRVFNIVFTSLFSLECVLKVMAFGILNYFRDAWNIF | 1550 |
| | \|\|\|\|\|\|\|\|\|\|\|\|\|\|\|\|\|\|\|\|\|\|\|\|\|\|\|\|\|\|\|\|\|\|\|\|\|\|\|\|\|\|\|\|\|\|\|\|\|\| | |
| 1584 | MMKFYGASVAYENALRVFNIVFTSLFSLECVLKVMAFGILNYFRDAWNIF | 1633 |
| | . . . . . | |
| 1551 | DFVTVLGSITDILVTEFGNNFINLSFLRLFRAARLIKLLRQGYTIRILLW | 1600 |
| | \|\|\|\|\|\|\|\|\|\|\|\|\|\|\|\|\|\|\|\|\|\|\|\|\|\|\|\|\|\|\|\|\|\|\|\|\|\|\|\|\|\|\|\|\|\|\|\|\|\| | |
| 1634 | DFVTVLGSITDILVTEFGNNFINLSFLRLFRAARLIKLLRQGYTIRILLW | 1683 |
| | . . . . . | |
| 1601 | TFVQSFKALPYVCLLIAMLFFIYAIIGMQVFGNIGIDVEDEDSDEDEFQI | 1650 |
| | \|\|\|\|\|\|\|\|\|\|\|\|\|\|\|\|\|\|\|\|\|\|\|\|\|\|\|\|\|\|\|\|\|\|\|\|\|\|\|\|\|\|\|\|\|\|\|\|\|\| | |
| 1684 | TFVQSFKALPYVCLLIAMLFFIYAIIGMQVFGNIGIDVEDEDSDEDEFQI | 1733 |
| | . . . . . | |
| 1651 | TEHNNFRTFFQALMLLFRSATGEAWHNIMLSCLSGKPCDKNSGILTRECG | 1700 |
| | \|\|\|\|\|\|\|\|\|\|\|\|\|\|\|\|\|\|\|\|\|\|\|\|\|\|\|\|\|\|\|\|\|\|\|\|\|\|\|\|\|\|\|\|\|\|\|\|\|\| | |
| 1734 | TEHNNFRTFFQALMLLFRSATGEAWHNIMLSCLSGKPCDKNSGILTRECG | 1783 |
| | . . . . . | |
| 1701 | NEFAYFYFVSFIFLCSFLMLNLFVAVIMDNFEYLTRDSSILGPHHLDEYV | 1750 |
| | \|\|\|\|\|\|\|\|\|\|\|\|\|\|\|\|\|\|\|\|\|\|\|\|\|\|\|\|\|\|\|\|\|\|\|\|\|\|\|\|\|\|\|\|\|\|\|\|\|\| | |
| 1784 | NEFAYFYFVSFIFLCSFLMLNLFVAVIMDNFEYLTRDSSILGPHHLDEYV | 1833 |
| | . . . . . | |
| 1751 | RVWAEYDPAA................................CGRI | 1764 |
| | \|\|\|\|\|\|\|\|\|\| | |
| 1834 | RVWAEYDPAAWGRMPYLDMYQMLRHMSPPLGLGKKCPARVAY.... | 1875 |
| | . . . . . | |
| 1765 | HYKDMYSLLRVISPPLGLGKKCPHRVACKRLLRMDLPVADDNTVHFNSTL | 1814 |
| | \|\|\|\|\|\|\|\|\|\|\|\|\|\|\|\|\|\|\|\|\|\| | |
| 1876 | ............................KRLLRMDLPVADDNTVHFNSTL | 1897 |
| | . . . . . | |
| 1815 | MALIRTALDIKIAKGGADKQQMDAELRKEMMAIWPNLSQKTLDLLVTPHK | 1864 |
| | \|\|\|\|\|\|\|\|\|\|\|\|\|\|\|\|\|\|\|\|\|\|\|\|\|\|\|\|\|\|\|\|\|\|\|\|\|\|\|\|\|\|\|\|\|\|\|\|\|\| | |
| 1898 | MALIRTALDIKIAKGGADKQQMDAELRKEMMAIWPNLSQKTLDLLVTPHK | 1947 |
| | . . . . . | |
| 1865 | STDLTVGKIYAAMMIMEYYRQSKAKKLQAMREEQDRTPLMFQRMEPPSPT | 1914 |
| | \|\|\|\|\|\|\|\|\|\|\|\|\|\|\|\|\|\|\|\|\|\|\|\|\|\|\|\|\|\|\|\|\|\|\|\|\|\|\|\|\|\|\|\|\|\|\|\|\|\| | |
| 1948 | STDLTVGKIYAAMMIMEYYRQSKAKKLQAMREEQDRTPLMFQRMEPPSPT | 1997 |
| | . . . . . | |
| 1915 | QEGGPGQNALPSTQLDPGGALMAHESGLKESPSWVTQRAQEMFQKTGTWS | 1964 |
| | \|\|\|\|\|\|\|\|\|\|\|\|\|\|\|\|\|\|\|\|\|\|\|\|\|\|\|\|\|\|\|\|\|\|\|\|\|\|\|\|\|\|\|\|\|\|\|\|\|\| | |
| 1998 | QEGGPGQNALPSTQLDPGGALMAHESGLKESPSWVTQRAQEMFQKTGTWS | 2047 |
| | . . . . . | |
| 1965 | PEQGPPTDMPNSQPNSQSVEMREMGRDGYSDSEHYLPMEGQGRAASMPRL | 2014 |
| | \|\|\|\|\|\|\|\|\|\|\|\|\|\|\|\|\|\|\|\|\|\|\|\|\|\|\|\|\|\|\|\|\|\|\|\|\|\|\|\|\|\|\|\|\|\|\|\|\|\| | |
| 2048 | PEQGPPTDMPNSQPNSQSVEMREMGRDGYSDSEHYLPMEGQGRAASMPRL | 2097 |
| | . . . . . | |
| 2015 | PAENQ............TISDTSPMKRSASVLGPKARRLDDYSLERVPPE | 2052 |
| | \|\|\|\|\| \|\|\|\|\|\|\|\|\|\|\|\|\|\|\|\|\|\|\|\|\|\|\|\|\|\|\|\|\|\|\|\|\| | |
| 2098 | PAENQRRRGRPRGNNLSTISDTSPMKRSASVLGPKARRLDDYSLERVPPE | 2147 |
| | . . . . . | |
| 2053 | ENQRHHQRRRDRSHRASERSLGRYTDVDTGLGTDLSMTTQSGDLPSKERD | 2102 |
| | \|\|\|\|\|\|\|\|\|\|\|\|\|\|\|\|\|\|\|\|\|\|\|\|\|\|\|\|\|\|\|\|\|\|\|\|\|\|\|\|\|\|\|\|\|\|\|\|\|\| | |
| 2148 | ENQRHHQRRRDRSHRASERSLGRYTDVDTGLGTDLSMTTQSGDLPSKERD | 2197 |
| | . . . . . | |
| 2103 | QERGRPKDRKHRQHHHHHHHHHHPPPPDKDRYAQERPDHGRARARDQRWS | 2152 |
| | \|\|\|\|\|\|\|\|\|\|\|\|\|\|\|\|\|\|\|\|\|\|\|\|\|\|\|\|\|\|\|\|\|\|\|\|\|\|\|\|\|\|\|\|\|\|\|\|\|\| | |
| 2198 | QERGRPKDRKHRQHHHHHHHHHHPPPPDKDRYAQERPDHGRARARDQRWS | 2247 |
| | . . . . . | |
| 2153 | RSPSEGREHMAHRQGSSSVSGSPAPSTSGTSTPRRGRRQLPQTPSTPRPH | 2202 |
| | \|\|\|\|\|\|\|\|\|\|\|\|\|\|\|\|\|\|\|\|\|\|\|\|\|\|\|\|\|\|\|\|\|\|\|\|\|\|\|\|\|\|\|\|\|\|\|\|\|\| | |
| 2248 | RSPSEGREHMAHRQGSSSVSGSPAPSTSGTSTPRRGRRQLPQTPSTPRPH | 2297 |
| | . . . . . | |
| 2203 | VSYSPVIRKAGGSGPRSSSSSSSSSSSRRWPGRAGRPPAALGGTQAPRPS | 2252 |
| | \|\|\|\|\|\|\|\|\|\|\|\|\|\|\| | |
| 2298 | VSYSPVIRKAGGSGP................................... | 2312 |
| | . . . . . | |
| 2253 | LWPEIGRPRGATAAAARPGWRGGSQARPGASPPGPVDTAGPGGRHLARTC | 2302 |
| 2312 | .................................................. | 2312 |
| | . . . . . | |
| 2303 | PRGPRVPGTMATTGAPTTTRPMARAAGAARRPWPGPTTRHPPYDTRPRAP | 2352 |
| 2312 | .................................................. | 2312 |
| | . . . . . | |
| 2353 | PGARPGLPGPRARPAPRLLGTAGDSPTATTRRTDWPGPAGRAPGRACTNP | 2402 |
| 2312 | .................................................. | 2312 |
| | . . . . . | |
| 2403 | TARVTMIGAKPGRGGARPAPHAPHAHTPPEEPRRGRGGPAQRARERASRE | 2452 |
| 2312 | .................................................. | 2312 |
| | . . . . . | |
| 2453 | TPDSGEARAGPQGCPAETLGQKRPSWAATAPPNQPRSPHPRQGLSGGRQG | 2502 |
| 2312 | .................................................. | 2312 |
| 2503 | ADKPHSQGI | 2511 |
| 2312 | ......... | 2312 |

### EXAMPLE 6

[0238] This Example relates to the variant T59742_P5 (SEQ ID NO:13; the nucleic acid sequence is given by SEQ ID NO:35), which is a variant alpha 1 subunit according to the present invention, and more specifically, is a splice variant of the known protein CCAA_HUMAN. The known protein structure and function is described above in Example 2.

[0239] The structure of the splice variant according to the present invention features a unique head, a skipped exon and a unique tail, as compared to the known protein sequence. An alignment is provided at the end of this section, while the comparison between the two sequences is described below.

[0240] According to preferred embodiments of the present invention, there is provided an isolated chimeric polypeptide encoding for T59742_P5, comprising a first amino acid sequence being at least 70%, optionally at least 80%, preferably at least 85%, more preferably at least 90% and most preferably at least 95% homologous to a polypeptide having the sequence (SEQ ID NO: 85) MSSWPTRPTKSTAPPRPGGKNGT corresponding to amino acids 1-23 of T59742_P5, a second amino acid sequence being at least 90% homologous to (SEQ ID NO: 86) TIIANCIVLALEQHLPDDDKTPMSERLDDTEPYFIGIFCFEAGIKIIALGFAFHKGSYLRNGWNVMDFVVVLTGILATVGTEFDLRTLRAVRVLRPLKLVSGIPSLQVVLKSIMKAMIPLLQIGLLLFFAILIFAIIGLEFYMGKFHTTCFEEGTDDIQGESPAPCGTEEPARTCPNGTKCQPYWEGPNNGITQFDNILFAVLTVFQCITMEGWTDLLYNSNDASGNTWNWLYFIPLIIIGSFFMLNLVLGVLSGEFAKERERVENRRAFLKLRRQQQIERELNGYMEWISKAEEVILAEDETDGEQRHPFDGALRRTTIKKSKTDLLNPEEAEDQLADIASVGSPFARASIKSAKLENSTFFHKKERRMRFYIRRMVKTQAFYWTVLSLVALNTLCVAIVHYNQPEWLSDFLYYAEFIFLGLFMSEMFIKMYGLGTRPYFHSSFNCFDCGVIIGSIFEVIWAVIKPGTSFGISVLRALRLLRIFKVTKYWASLRNLVVSLLNSMKSIISLLFLLFLFIVVFALLGMQLFGGQFNFDEGTPPTNFDTFPAAIMTVFQILTGEDWNEVMYDGIKSQGGVQGGMVFSIYFIVLTLFGNYTLLNVFLAIAVDNLANAQELTKDEQEEEEAANQKLALQKAKEVAEVSPLSAANMSIAVKEQQKNQKPAKSVWEQRTSEMRKQNLLASREALYNEMDPDERWKAAYTRHLRPDMKTHLDRPLVVDPQENRNNNTNKSRAAEPTVDQRLGQQRAEDFLRKQARYHDRARDPSGSAGLDARRPWAGSQEAELSREGPYGRESDHHAREGSLEQPGFWEGEAERGKAGDPHRRHVHRQGGSRESRSGSPRTGADGEHRRHRAHRRPGEEGPEDKAERRARHREGSRPARGGEGEGEGPDGGERRRRHRHGAPATYEGDARREDKERRHRRRKENQGSGVPVSGPNLSTTRPIQQDLGRQDPPLAEDIDNMKNNKLATAESAAPHGSLGHAGLPQSPAKMGNSTDPGPMLAIPAMATNPQNAASRRTPNNPGNPSNPGPPKTPENSLIVTNPSGTQTNSAKTARKPDHTTVDIPPACPPPLNHTVVQVNKNANPDPLPKKEEEKKEEEEDDRGEDGPKPMPPYSSMFILSTTNPLRRLCHYILNLRYFEMCILMVIAMSSIALAAEDPVQPNAPRNNVLRYFDYVFTGVFTFEMVIKMIDLGLVLHQGAYFRDLWNILDFIVVSGALVAFAFTGNSKGKDINTIKSLRVLRVLRPLKTIKRLPKLKAVFDCVVNSLKNVFNILIVYMLFMFIFAVVAVQLFKGKFFHCTDESKEFEKDCRGKYLLYEKNEVKARDREWKKYEFHYDNVLWALLTLFTVSTGEGWPQVLKHSVDATFENQGPSPGYRMEMSIFYVVYFVVFPFFFVNIFVALIIITFQEQGDKMMEEYSLEKNERACIDFAISAKPLTRHMPQNKQSFQYRMWQFVVSPPFEYTIMAMIALNTIVLMMKFYGASVAYENALRVFNIVFTSLFSLECVLKVMAFGILNYFRDAWNIFDFVTVLGSITDILVTEFGNNFINLSFLRLFRAARLIKLLRQGYTIRILLWTFVQSFKALPYVCLLIAMLFFIYAIIGMQVFGNIGIDVEDEDSDEDEFQITEHNNFRTFFQALMLLFRSATGEAWHNIMLSCLSGKPCDKNSGILTRECGNEFAYFYFVSFIFLCSFLMLNLFVAVIMDNFEYLTRDSSILGPHHLDEYVRVWAEYDPAAWGRMPYLDMYQMLRHMSPPLGLGKKCPARVAYKRLLRMDLPVADDNTVHFNSTLMALIRTALDIKIAKGGADKQQMDAELRKEMMAIWPNLSQKTLDLLVTPHKSTDLTVGKIYAAMMIMEYYRQSKAKKLQAMREEQDRTPLMFQRMEPPSPTQEGGPGQNALPSTQLDPGGALMAHESGLKESPSWVTQRAQEMFQKTGTWSPEQGPPTDMPNSQPNSQSVEMREMGRDGYSDSEHYLPMEGQGRAASMPRLPAENQ corresponding to amino acids 107-2102 of CCAA_HUMAN, which also corresponds to amino acids 24-2019 of T59742_P5, a third amino acid sequence being at least 90% homologous to (SEQ ID NO: 87) TISDTSPMKRSASVLGPKARRLDDYSLERVPPEENQRHHQRRRDRSHRASERSLGRYTDVDTGLGTDLSMTTQSGDLPSKERDQERGRPKDRKHRQHHHHHHHHHHPPPPDKDRYAQERPDHGRARARDQRWSRSPSEGREHMAHRQGSSSVSGSPAPSTSGTSTPRRGRRQLPQTPSTPRPHVSYSPVIRKAGGSGP corresponding to amino acids 2115-2312 of CCAA_HUMAN, which also corresponds to amino acids 2020-2217 of T59742_P5, and a fourth amino acid sequence being at least 70%, optionally at least 80%, preferably at least 85%, more preferably at least 90% and most preferably at least 95% homologous to a polypeptide having the sequence (SEQ ID NO: 88) RSSSSSSSSSSSRRWPGRAGRPPAALGGTQAPRPSLWPEIGRPRGATAAAARPGWRGGSQARPGASPPGPVDTAGPGGRHLARTCPRGPRVPGTMATTGAPTTTRPMARAAGAARRPWPGPTTRHPPYDTRPRAPPGARPGLPGPRARPAPRLLGTAGDSPTATTRRTDWPGPAGRAPGRACTNPTARVTMIGAKPGRGGARPAPHAPHAHTPPEEPRRGRGGPAQRARERASRETPDSGEARAGPQGCPAETLGQKRPSWAATAPPNQPRSPHPRQGLSGGRQGADKPHSQGI corresponding to amino acids 2218-2511 of T59742_P5, wherein said first amino acid sequence, second amino acid sequence, third amino acid sequence and fourth amino acid sequence are contiguous and in a sequential order.

[0241] According to preferred embodiments of the present invention, there is provided an isolated polypeptide encoding for a head of T59742_P5, comprising a polypeptide being at least 70%, optionally at least about 80%, preferably at least about 85%, more preferably at least about 90% and most preferably at least about 95% homologous to the sequence (SEQ ID NO: 89) MSSWPTRPTKSTAPPRPGGKNGT of T59742_P5.

[0242] According to preferred embodiments of the present invention, there is provided an isolated chimeric polypeptide encoding for an edge portion of T59742_P5, comprising a polypeptide having a length “n”, wherein n is at least about 10 amino acids in length, optionally at least about 20 amino acids in length, preferably at least about 30 amino acids in length, more preferably at least about 40 amino acids in length and most preferably at least about 50 amino acids in length, wherein at least two amino acids comprise QT, having a structure as follows: a sequence starting from any of amino acid numbers 2019−x to 2020; and ending at any of amino acid numbers 2020+((n−2)−x), in which x varies from 0 to n−2.

[0243] According to preferred embodiments of the present invention, there is provided an isolated polypeptide encoding for a tail of T59742_P5, comprising a polypeptide being at least 70%, optionally at least about 80%, preferably at least about 85%, more preferably at least about 90% and most preferably at least about 95% homologous to the sequence (SEQ ID NO: 90) RSSSSSSSSSSSRRWPGRAGRPPAALGGTQAPRPSLWPEIGRPRGATAAAARPGWRGGSQARPGASPPGPVDTAGPGGRHLARTCPRGPRVPGTMATTGAPTTTRPMARAAGAARRPWPGPTTRHPPYDTRPRAPPGARPGLPGPRARPAPRLLGTAGDSPTATTRRTDWPGPAGRAPGRACTNPTARVTMIGAKPGRGGARPAPHAPHAHTPPEEPRRGRGGPAQRARERASRETPDSGEARAGPQGCPAETLGQKRPSWAATAPPNQPRSPHPRQGLSGGRQGADKPHSQGI in T59742_P5.

[0244] Domains affected by alternative splicing include the cytoplasmic N-terminus region of the protein; the S1 transmembrane domain of domain I and the cytoplasmic C-terminus region of the protein.

[0245] Effects of these changes are described with regard to Example 2 above.

[0246] From the above description of the effect of changes to the C-terminus domain of this variant, it is expected that the variant has a greater current amplitude as compared to the known protein and a stronger calcium dependence of inactivation.

Sequence name: CCAA_HUMAN

documentation:

of: T59742_P5 (resideues 24-2217 of SEQ ID NO: 13)×CCAA_HUMAN (SEQ ID NO: 91) . . .

segment 1/1:

[0247] Quality: 21614.00

Escore: 0

Matching length: 2194 Total

length: 2206

Matching Percent Similarity: 100.00 Matching Percent

Identity: 100.00

Total Percent Similarity: 99.46 Total Percent

Identity: 99.46

[0248] Gaps: 1

| | . . . . . | |
|---|---|---|
| 24 | TIIANCIVLALEQHLPDDDKTPMSERLDDTEPYFIGIFCFEAGIKIIALG | 73 |
| | \|\|\|\|\|\|\|\|\|\|\|\|\|\|\|\|\|\|\|\|\|\|\|\|\|\|\|\|\|\|\|\|\|\|\|\|\|\|\|\|\|\|\|\|\|\|\|\|\|\| | |
| 107 | TIIANCIVLALEQHLPDDDKTPMSERLDDTEPYFIGIFCFEAGIKIIALG | 156 |
| | . . . . . | |
| 74 | FAFHKGSYLRNGWNVMDFVVVLTGILATVGTEFDLRTLRAVRVLRPLKLV | 123 |
| | \|\|\|\|\|\|\|\|\|\|\|\|\|\|\|\|\|\|\|\|\|\|\|\|\|\|\|\|\|\|\|\|\|\|\|\|\|\|\|\|\|\|\|\|\|\|\|\|\|\| | |
| 157 | FAFHKGSYLRNGWNVMDFVVVLTGILATVGTEFDLRTLRAVRVLRPLKLV | 206 |
| | . . . . . | |
| 124 | SGIPSLQVVLKSIMKAMIPLLQIGLLLFFAILIFAIIGLEFYMGKFHTTC | 173 |
| | \|\|\|\|\|\|\|\|\|\|\|\|\|\|\|\|\|\|\|\|\|\|\|\|\|\|\|\|\|\|\|\|\|\|\|\|\|\|\|\|\|\|\|\|\|\|\|\|\|\| | |
| 207 | SGIPSLQVVLKSIMKAMIPLLQIGLLLFFAILIFAIIGLEFYMGKFHTTC | 256 |
| | . . . . . | |
| 174 | FEEGTDDIQGESPAPCGTEEPARTCPNGTKCQPYWEGPNNGITQFDNILF | 223 |
| | \|\|\|\|\|\|\|\|\|\|\|\|\|\|\|\|\|\|\|\|\|\|\|\|\|\|\|\|\|\|\|\|\|\|\|\|\|\|\|\|\|\|\|\|\|\|\|\|\|\| | |
| 257 | FEEGTDDIQGESPAPCGTEEPARTCPNGTKCQPYWEGPNNGITQFDNILF | 306 |
| | . . . . . | |
| 224 | AVLTVFQCITMEGWTDLLYNSNDASGNTWNWLYFIPLIIIGSFFMLNLVL | 273 |
| | \|\|\|\|\|\|\|\|\|\|\|\|\|\|\|\|\|\|\|\|\|\|\|\|\|\|\|\|\|\|\|\|\|\|\|\|\|\|\|\|\|\|\|\|\|\|\|\|\|\| | |
| 307 | AVLTVFQCITMEGWTDLLYNSNDASGNTWNWLYFIPLIIIGSFFMLNLVL | 356 |
| | . . . . . | |
| 274 | GVLSGEFAKERERVENRRAFLKLRRQQQIERELNGYMEWISKAEEVILAE | 323 |
| | \|\|\|\|\|\|\|\|\|\|\|\|\|\|\|\|\|\|\|\|\|\|\|\|\|\|\|\|\|\|\|\|\|\|\|\|\|\|\|\|\|\|\|\|\|\|\|\|\|\| | |
| 357 | GVLSGEFAKERERVENRRAFLKLRRQQQIERELNGYMEWISKAEEVILAE | 406 |
| | . . . . . | |
| 324 | DETDGEQRHPFDGALRRTTIKKSKTDLLNPEEAEDQLADIASVGSPFARA | 373 |
| | \|\|\|\|\|\|\|\|\|\|\|\|\|\|\|\|\|\|\|\|\|\|\|\|\|\|\|\|\|\|\|\|\|\|\|\|\|\|\|\|\|\|\|\|\|\|\|\|\|\| | |
| 407 | DETDGEQRHPFDGALRRTTIKKSKTDLLNPEEAEDQLADIASVGSPFARA | 456 |
| | . . . . . | |
| 374 | SIKSAKLENSTFFHKKERRMRFYIRRMVKTQAFYWTVLSLVALNTLCVAI | 423 |
| | \|\|\|\|\|\|\|\|\|\|\|\|\|\|\|\|\|\|\|\|\|\|\|\|\|\|\|\|\|\|\|\|\|\|\|\|\|\|\|\|\|\|\|\|\|\|\|\|\|\| | |
| 457 | SIKSAKLENSTFFHKKERRMRFYIRRMVKTQAFYWTVLSLVALNTLCVAI | 506 |
| | . . . . . | |
| 424 | VHYNQPEWLSDFLYYAEFIFLGLFMSEMFIKMYGLGTRPYFHSSFNCFDC | 473 |
| | \|\|\|\|\|\|\|\|\|\|\|\|\|\|\|\|\|\|\|\|\|\|\|\|\|\|\|\|\|\|\|\|\|\|\|\|\|\|\|\|\|\|\|\|\|\|\|\|\|\| | |
| 507 | VHYNQPEWLSDFLYYAEFIFLGLFMSEMFIKMYGLGTRPYFHSSFNCFDC | 556 |
| | . . . . . | |
| 474 | GVIIGSIFEVIWAVIKPGTSFGISVLRALRLLRIFKVTKYWASLRNLVVS | 523 |
| | \|\|\|\|\|\|\|\|\|\|\|\|\|\|\|\|\|\|\|\|\|\|\|\|\|\|\|\|\|\|\|\|\|\|\|\|\|\|\|\|\|\|\|\|\|\|\|\|\|\| | |
| 557 | GVIIGSIFEVIWAVIKPGTSFGISVLRALRLLRIFKVTKYWASLRNLVVS | 606 |
| | . . . . . | |
| 524 | LLNSMKSIISLLFLLFLFIVVFALLGMQLFGGQFNFDEGTPPTNFDTFPA | 573 |
| | \|\|\|\|\|\|\|\|\|\|\|\|\|\|\|\|\|\|\|\|\|\|\|\|\|\|\|\|\|\|\|\|\|\|\|\|\|\|\|\|\|\|\|\|\|\|\|\|\|\| | |
| 607 | LLNSMKSIISLLFLLFLFIVVFALLGMQLFGGQFNFDEGTPPTNFDTFPA | 656 |
| | . . . . . | |
| 574 | AIMTVFQILTGEDWNEVMYDGIKSQGGVQGGMVFSIYFIVLTLFGNYTLL | 623 |
| | \|\|\|\|\|\|\|\|\|\|\|\|\|\|\|\|\|\|\|\|\|\|\|\|\|\|\|\|\|\|\|\|\|\|\|\|\|\|\|\|\|\|\|\|\|\|\|\|\|\| | |
| 657 | AIMTVFQILTGEDWNEVMYDGIKSQGGVQGGMVFSIYFIVLTLFGNYTLL | 706 |
| | . . . . . | |
| 624 | NVFLAIAVDNLANAQELTKDEQEEEEAANQKLALQKAKEVAEVSPLSAAN | 673 |
| | \|\|\|\|\|\|\|\|\|\|\|\|\|\|\|\|\|\|\|\|\|\|\|\|\|\|\|\|\|\|\|\|\|\|\|\|\|\|\|\|\|\|\|\|\|\|\|\|\|\| | |
| 707 | NVFLAIAVDNLANAQELTKDEQEEEEAANQKLALQKAKEVAEVSPLSAAN | 756 |
| | . . . . . | |
| 674 | MSIAVKEQQKNQKPAKSVWEQRTSEMRKQNLLASREALYNEMDPDERWKA | 723 |
| | \|\|\|\|\|\|\|\|\|\|\|\|\|\|\|\|\|\|\|\|\|\|\|\|\|\|\|\|\|\|\|\|\|\|\|\|\|\|\|\|\|\|\|\|\|\|\|\|\|\| | |
| 757 | MSIAVKEQQKNQKPAKSVWEQRTSEMRKQNLLASREALYNEMDPDERWKA | 806 |
| | . . . . . | |
| 724 | AYTRHLRPDMKTHLDRPLVVDPQENRNNNTNKSRAAEPTVDQRLGQQRAE | 773 |
| | \|\|\|\|\|\|\|\|\|\|\|\|\|\|\|\|\|\|\|\|\|\|\|\|\|\|\|\|\|\|\|\|\|\|\|\|\|\|\|\|\|\|\|\|\|\|\|\|\|\| | |
| 807 | AYTRHLRPDMKTHLDRPLVVDPQENRNNNTNKSRAAEPTVDQRLGQQRAE | 856 |
| | . . . . . | |
| 774 | DFLRKQARYHDRARDPSGSAGLDARRPWAGSQEAELSREGPYGRESDHHA | 823 |
| | \|\|\|\|\|\|\|\|\|\|\|\|\|\|\|\|\|\|\|\|\|\|\|\|\|\|\|\|\|\|\|\|\|\|\|\|\|\|\|\|\|\|\|\|\|\|\|\|\|\| | |
| 857 | DFLRKQARYHDRARDPSGSAGLDARRPWAGSQEAELSREGPYGRESDHHA | 906 |
| | . . . . . | |
| 824 | REGSLEQPGFWEGEAERGKAGDPHRRHVHRQGGSRESRSGSPRTGADGEH | 873 |
| | \|\|\|\|\|\|\|\|\|\|\|\|\|\|\|\|\|\|\|\|\|\|\|\|\|\|\|\|\|\|\|\|\|\|\|\|\|\|\|\|\|\|\|\|\|\|\|\|\|\| | |
| 907 | REGSLEQPGFWEGEAERGKAGDPHRRHVHRQGGSRESRSGSPRTGADGEH | 956 |
| | . . . . . | |
| 874 | RRHRAHRRPGEEGPEDKAERRARHREGSRPARGGEGEGEGPDGGERRRRH | 923 |
| | \|\|\|\|\|\|\|\|\|\|\|\|\|\|\|\|\|\|\|\|\|\|\|\|\|\|\|\|\|\|\|\|\|\|\|\|\|\|\|\|\|\|\|\|\|\|\|\|\|\| | |
| 957 | RRHRAHRRPGEEGPEDKAERRARHREGSRPARGGEGEGEGPDGGERRRRH | 1006 |
| | . . . . . | |
| 924 | RHGAPATYEGDARREDKERRHRRRKENQGSGVPVSGPNLSTTRPIQQDLG | 973 |
| | \|\|\|\|\|\|\|\|\|\|\|\|\|\|\|\|\|\|\|\|\|\|\|\|\|\|\|\|\|\|\|\|\|\|\|\|\|\|\|\|\|\|\|\|\|\|\|\|\|\| | |
| 1007 | RHGAPATYEGDARREDKERRHRRRKENQGSGVPVSGPNLSTTRPIQQDLG | 1056 |
| | . . . . . | |
| 974 | RQDPPLAEDIDNMKNNKLATAESAAPHGSLGHAGLPQSPAKMGNSTDPGP | 1023 |
| | \|\|\|\|\|\|\|\|\|\|\|\|\|\|\|\|\|\|\|\|\|\|\|\|\|\|\|\|\|\|\|\|\|\|\|\|\|\|\|\|\|\|\|\|\|\|\|\|\|\| | |
| 1057 | RQDPPLAEDIDNMKNNKLATAESAAPHGSLGHAGLPQSPAKMGNSTDPGP | 1106 |
| | . . . . . | |
| 1024 | MLAIPAMATNPQNAASRRTPNNPGNPSNPGPPKTPENSLIVTNPSGTQTN | 1073 |
| | \|\|\|\|\|\|\|\|\|\|\|\|\|\|\|\|\|\|\|\|\|\|\|\|\|\|\|\|\|\|\|\|\|\|\|\|\|\|\|\|\|\|\|\|\|\|\|\|\|\| | |
| 1107 | MLAIPAMATNPQNAASRRTPNNPGNPSNPGPPKTPENSLIVTNPSGTQTN | 1156 |
| | . . . . . | |
| 1074 | SAKTARKPDHTTVDIPPACPPPLNHTVVQVNKNANPDPLPKKEEEKKEEE | 1123 |
| | \|\|\|\|\|\|\|\|\|\|\|\|\|\|\|\|\|\|\|\|\|\|\|\|\|\|\|\|\|\|\|\|\|\|\|\|\|\|\|\|\|\|\|\|\|\|\|\|\|\| | |
| 1157 | SAKTARKPDHTTVDLPPACPPPLNHTVVQVNKNANPDPLPKKEEEKKEEE | 1206 |
| | . . . . . | |
| 1124 | EDDRGEDGPKPMPPYSSMFILSTTNPLRRLCHYILNLRYFEMCILMVIAM | 1173 |
| | \|\|\|\|\|\|\|\|\|\|\|\|\|\|\|\|\|\|\|\|\|\|\|\|\|\|\|\|\|\|\|\|\|\|\|\|\|\|\|\|\|\|\|\|\|\|\|\|\|\| | |
| 1207 | EDDRGEDGPKPMPPYSSMFILSTTNPLRRLCHYILNLRYFEMCILMVIAM | 1256 |
| | . . . . . | |
| 1174 | SSIALAAEDPVQPNAPRNNVLRYFDYVFTGVFTFEMVIKMIDLGLVLHQG | 1223 |
| | \|\|\|\|\|\|\|\|\|\|\|\|\|\|\|\|\|\|\|\|\|\|\|\|\|\|\|\|\|\|\|\|\|\|\|\|\|\|\|\|\|\|\|\|\|\|\|\|\|\| | |
| 1257 | SSIALAAEDPVQPNAPRNNVLRYFDYVFTGVFTFEMVIKMIDLGLVLHQG | 1306 |
| | . . . . . | |
| 1224 | AYFRDLWNILDFIVVSGALVAFAFTGNSKGKDINTIKSLRVLRVLRPLKT | 1273 |
| | \|\|\|\|\|\|\|\|\|\|\|\|\|\|\|\|\|\|\|\|\|\|\|\|\|\|\|\|\|\|\|\|\|\|\|\|\|\|\|\|\|\|\|\|\|\|\|\|\|\| | |
| 1307 | AYFRDLWNILDFIVVSGALVAFAFTGNSKGKDINTIKSLRVLRVLRPLKT | 1356 |
| | . . . . . | |
| 1274 | IKRLPKLKAVFDCVVNSLKNVFNILIVYMLFMFIFAVVAVQLFKGKFFHC | 1323 |
| | \|\|\|\|\|\|\|\|\|\|\|\|\|\|\|\|\|\|\|\|\|\|\|\|\|\|\|\|\|\|\|\|\|\|\|\|\|\|\|\|\|\|\|\|\|\|\|\|\|\| | |
| 1357 | IKRLPKLKAVFDCVVNSLKNVFNILIVYMLFMFIFAVVAVQLFKGKFFHC | 1406 |
| | . . . . . | |
| 1324 | TDESKEFEKDCRGKYLLYEKNEVKARDREWKKYEFHYDNVLWALLTLFTV | 1373 |
| | \|\|\|\|\|\|\|\|\|\|\|\|\|\|\|\|\|\|\|\|\|\|\|\|\|\|\|\|\|\|\|\|\|\|\|\|\|\|\|\|\|\|\|\|\|\|\|\|\|\| | |
| 1407 | TDESKEFEKDCRGKYLLYEKNEVKARDREWKKYEFHYDNVLWALLTLFTV | 1456 |
| | . . . . . | |
| 1374 | STGEGWPQVLKHSVDATFENQGPSPGYRMEMSIFYVVYFVVFPFFFVNIF | 1423 |
| | \|\|\|\|\|\|\|\|\|\|\|\|\|\|\|\|\|\|\|\|\|\|\|\|\|\|\|\|\|\|\|\|\|\|\|\|\|\|\|\|\|\|\|\|\|\|\|\|\|\| | |
| 1457 | STGEGWPQVLKHSVDATFENQGPSPGYRMEMSIFYVVYFVVFPFFFVNIF | 1506 |
| | . . . . . | |
| 1424 | VALIIITFQEQGDKMMEEYSLEKNERACIDFAISAKPLTRHMPQNKQSFQ | 1473 |
| | \|\|\|\|\|\|\|\|\|\|\|\|\|\|\|\|\|\|\|\|\|\|\|\|\|\|\|\|\|\|\|\|\|\|\|\|\|\|\|\|\|\|\|\|\|\|\|\|\|\| | |
| 1507 | VALIIITFQEQGDKMMEEYSLEKNERACIDFAISAKPLTRHMPQNKQSFQ | 1556 |
| | . . . . . | |
| 1474 | YRMWQFVVSPPFEYTIMAMIALNTIVLMMKFYGASVAYENALRVFNIVFT | 1523 |
| | \|\|\|\|\|\|\|\|\|\|\|\|\|\|\|\|\|\|\|\|\|\|\|\|\|\|\|\|\|\|\|\|\|\|\|\|\|\|\|\|\|\|\|\|\|\|\|\|\|\| | |
| 1557 | YRMWQFVVSPPFEYTIMAMIALNTIVLMMKFYGASVAYENALRVFNIVFT | 1606 |
| | . . . . . | |
| 1524 | SLFSLECVLKVMAFGILNYFRDAWNIFDFVTVLGSITDILVTEFGNNFIN | 1573 |
| | \|\|\|\|\|\|\|\|\|\|\|\|\|\|\|\|\|\|\|\|\|\|\|\|\|\|\|\|\|\|\|\|\|\|\|\|\|\|\|\|\|\|\|\|\|\|\|\|\|\| | |
| 1607 | SLFSLECVLKVMAFGILNYFRDAWNIFDFVTVLGSITDILVTEFGNNFIN | 1656 |
| | . . . . . | |
| 1574 | LSFLRLFRAARLIKLLRQGYTIRILLWTFVQSFKALPYVCLLIAMLFFIY | 1623 |
| | \|\|\|\|\|\|\|\|\|\|\|\|\|\|\|\|\|\|\|\|\|\|\|\|\|\|\|\|\|\|\|\|\|\|\|\|\|\|\|\|\|\|\|\|\|\|\|\|\|\| | |
| 1657 | LSFLRLFRAARLIKLLRQGYTIRILLWTFVQSFKALPYVCLLIAMLFFIY | 1706 |
| | . . . . . | |
| 1624 | AIIGMQVFGNIGIDVEDEDSDEDEFQITEHNNFRTFFQALMLLFRSATGE | 1673 |
| | \|\|\|\|\|\|\|\|\|\|\|\|\|\|\|\|\|\|\|\|\|\|\|\|\|\|\|\|\|\|\|\|\|\|\|\|\|\|\|\|\|\|\|\|\|\|\|\|\|\| | |
| 1707 | AIIGMQVFGNIGIDVEDEDSDEDEFQITEHNNFRTFFQALMLLFRSATGE | 1756 |
| | . . . . . | |
| 1674 | AWHNIMLSCLSGKPCDKNSGILTRECGNEFAYFYFVSFIFLCSFLMLNLF | 1723 |
| | \|\|\|\|\|\|\|\|\|\|\|\|\|\|\|\|\|\|\|\|\|\|\|\|\|\|\|\|\|\|\|\|\|\|\|\|\|\|\|\|\|\|\|\|\|\|\|\|\|\| | |
| 1757 | AWHNIMLSCLSGKPCDKNSGILTRECGNEFAYFYFVSFIFLCSFLMLNLF | 1806 |
| | . . . . . | |
| 1724 | VAVIMDNFEYLTRDSSILGPHHLDEYVRVWAEYDPAAWGRMPYLDMYQML | 1773 |
| | \|\|\|\|\|\|\|\|\|\|\|\|\|\|\|\|\|\|\|\|\|\|\|\|\|\|\|\|\|\|\|\|\|\|\|\|\|\|\|\|\|\|\|\|\|\|\|\|\|\| | |
| 1807 | VAVIMDNFEYLTRDSSILGPHHLDEYVRVWAEYDPAAWGRMPYLDMYQML | 1856 |
| | . . . . . | |
| 1774 | RHMSPPLGLGKKCPARVAYKRLLRMDLPVADDNTVHFNSTLMALIRTALD | 1823 |
| | \|\|\|\|\|\|\|\|\|\|\|\|\|\|\|\|\|\|\|\|\|\|\|\|\|\|\|\|\|\|\|\|\|\|\|\|\|\|\|\|\|\|\|\|\|\|\|\|\|\| | |
| 1857 | RHMSPPLGLGKKCPARVAYKRLLRMDLPVADDNTVHFNSTLMALIRTALD | 1906 |
| | . . . . . | |
| 1824 | IKIAKGGADKQQMDAELRKEMMAIWPNLSQKTLDLLVTPHKSTDLTVGKI | 1873 |
| | \|\|\|\|\|\|\|\|\|\|\|\|\|\|\|\|\|\|\|\|\|\|\|\|\|\|\|\|\|\|\|\|\|\|\|\|\|\|\|\|\|\|\|\|\|\|\|\|\|\| | |
| 1907 | IKIAKGGADKQQMDAELRKEMMAIWPNLSQKTLDLLVTPHKSTDLTVGKI | 1956 |
| | . . . . . | |
| 1874 | YAAMMIMEYYRQSKAKKLQAMREEQDRTPLMFQRMEPPSPTQEGGPGQNA | 1923 |
| | \|\|\|\|\|\|\|\|\|\|\|\|\|\|\|\|\|\|\|\|\|\|\|\|\|\|\|\|\|\|\|\|\|\|\|\|\|\|\|\|\|\|\|\|\|\|\|\|\|\| | |
| 1957 | YAAMMIMEYYRQSKAKKLQAMREEQDRTPLMFQRMEPPSPTQEGGPGQNA | 2006 |
| | . . . . . | |
| 1924 | LPSTQLDPGGALMAHESGLKESPSWVTQRAQEMFQKTGTWSPEQGPPTDM | 1973 |
| | \|\|\|\|\|\|\|\|\|\|\|\|\|\|\|\|\|\|\|\|\|\|\|\|\|\|\|\|\|\|\|\|\|\|\|\|\|\|\|\|\|\|\|\|\|\|\|\|\|\| | |
| 2007 | LPSTQLDPGGALMAHESGLKESPSWVTQRAQEMFQKTGTWSPEQGPPTDM | 2056 |
| | . . . . . | |
| 1974 | PNSQPNSQSVEMREMGRDGYSDSEHYLPMEGQGRAASMPRLPAENQ.... | 2019 |
| | \|\|\|\|\|\|\|\|\|\|\|\|\|\|\|\|\|\|\|\|\|\|\|\|\|\|\|\|\|\|\|\|\|\|\|\|\|\|\|\|\|\|\|\|\|\| | |
| 2057 | PNSQPNSQSVEMREMGRDGYSDSEHYLPMEGQGRAASMPRLPAENQRRRG | 2106 |
| | . . . . . | |
| 2020 | ........TISDTSPMKRSASVLGPKARRLDDYSLERVPPEENQRHHQRR | 2061 |
| | \|\|\|\|\|\|\|\|\|\|\|\|\|\|\|\|\|\|\|\|\|\|\|\|\|\|\|\|\|\|\|\|\|\|\|\|\|\|\|\|\|\| | |
| 2107 | RPRGNNLSTISDTSPMKRSASVLGPKARRLDDYSLERVPPEENQRHHQRR | 2156 |
| | . . . . . | |
| 2062 | RDRSHRASERSLGRYTDVDTGLGTDLSMTTQSGDLPSKERDQERGRPKDR | 2111 |
| | \|\|\|\|\|\|\|\|\|\|\|\|\|\|\|\|\|\|\|\|\|\|\|\|\|\|\|\|\|\|\|\|\|\|\|\|\|\|\|\|\|\|\|\|\|\|\|\|\|\| | |
| 2157 | RDRSHRASERSLGRYTDVDTGLGTDLSMTTQSGDLPSKERDQERGRPKDR | 2206 |
| | . . . . . | |
| 2122 | KHRQHHHHHHHHHHPPPPDKDRYAQERPDHGRARARDQRWSRSPSEGREH | 2161 |
| | \|\|\|\|\|\|\|\|\|\|\|\|\|\|\|\|\|\|\|\|\|\|\|\|\|\|\|\|\|\|\|\|\|\|\|\|\|\|\|\|\|\|\|\|\|\|\|\|\|\| | |
| 2207 | KHRQHHHHHHHHHHPPPPDKDRYAQERPDHGRARARDQRWSRSPSEGREH | 2256 |
| | . . . . . | |
| 2162 | MAHRQGSSSVSGSPAPSTSGTSTPRRGRRQLPQTPSTPRPHVSYSPVIRK | 2211 |
| | \|\|\|\|\|\|\|\|\|\|\|\|\|\|\|\|\|\|\|\|\|\|\|\|\|\|\|\|\|\|\|\|\|\|\|\|\|\|\|\|\|\|\|\|\|\|\|\|\|\| | |
| 2257 | MAHRQGSSSVSGSPAPSTSGTSTPRRGRRQLPQTPSTPRPHVSYSPVIRK | 2306 |
| 2212 | AGGSGP | 2217 |
| | \|\|\|\|\|\| | |
| 2307 | AGGSGP | 2312 |

### EXAMPLE 7

[0249] This Example relates to the variant T59742_P9 (SEQ ID NO:15; the nucleic acid sequence is given by SEQ ID NO:37), which is a variant alpha 1 subunit according to the present invention, and more specifically, is a splice variant of the known protein CCAA_HUMAN. The known protein structure and function is described above in Example 2.

[0250] The structure of the splice variant according to the present invention features a unique head and a unique tail, as compared to the known protein sequence. An alignment is provided at the end of this section, while the comparison between the two sequences is described below.

[0251] According to preferred embodiments of the present invention, there is provided an isolated chimeric polypeptide encoding for T59742_P9, comprising a first amino acid sequence being at least 70%, optionally at least 80%, preferably at least 85%, more preferably at least 90% and most preferably at least 95% homologous to a polypeptide having the sequence (SEQ ID NO: 92) MSSWPTRPTKSTAPPRPGGKNGT corresponding to amino acids 1-23 of T59742_P9, a second amino acid sequence being at least 90% homologous to (SEQ ID NO: 93) TIIANCIVLALEQHLPDDDKTPMSERLDDTEPYFIGIFCFEAGIKIIALGFAFHKGSYLRNGWNVMDFVVVLTGILATVGTEFDLRTLRAVRVLRPLKLVSGIPSLQVVLKSIMKAMIPLLQIGLLLFFAILIFAIIGLEFYMGKFHTTCFEEGTDDIQGESPAPCGTEEPARTCPNGTKCQPYWEGPNNGITQFDNILFAVLTVFQCITMEGWTDLLYNSNDASGNTWNWLYFIPLIIIGSFFMLNLVLGVLSGEFAKERERVENRRAFLKLRRQQQIERELNGYMEWISKAEEVILAEDETDGEQRHPFDGALRRTTIKKSKTDLLNPEEAEDQLADIASVGSPFARASIKSAKLENSTFFHKKERRMRFYIRRMVKTQAFYWTVLSLVALNTLCVAIVHYNQPEWLSDFLYYAEFIFLGLFMSEMFIKMYGLGTRPYFHSSFNCFDCGVIIGSIFEVIWAVIKPGTSFGISVLRALRLLRIFKVTKYWASLRNLVVSLLNSMKSIISLLFLLFLFIVVFALLGMQLFGGQFNFDEGTPPTNFDTFPAAIMTVFQILTGEDWNEVMYDGIKSQGGVQGGMVFSIYFIVLTLFGNYTLLNVFLAIAVDNLANAQELTKDEQEEEEAANQKLALQKAKEVAEVSPLSAANMSIAVKEQQKNQKPAKSVWEQRTSEMRKQNLLASREALYNEMDPDERWKAAYTRHLRPDMKTHLDRPLVVDPQENRNNNTNKSRAAEPTVDQRLGQQRAEDFLRKQARYHDRARDPSGSAGLDARRPWAGSQEAELSREGPYGRESDHHAREGSLEQPGFWEGEAERGKAGDPHRRHVHRQGGSRESRSGSPRTGADGEHRRHRAHRRPGEEGPEDKAERRARHREGSRPARGGEGEGEGPDGGERRRRHRHGAPATYEGDARREDKERRHRRRKENQGSGVPVSGPNLSTTRPIQQDLGRQDPPLAEDIDNMKNNKLATAESAAPHGSLGHAGLPQSPAKMGNSTDPGPMLAIPAMATNPQNAASRRTPNNPGNPSNPGPPKTPENSLIVTNPSGTQTNSAKTARKPDHTTVDIPPACPPPLNHTVVQVNKNANPDPLPKKEEEKKEEEEDDRGEDGPKPMPPYSSMFILSTTNPLRRLCHYILNLRYFEMCILMVIAMSSIALAAEDPVQPNAPRNNVLRYFDYVFTGVFTFEMVIKMIDLGLVLHQGAYFRDLWNILDFIVVSGALVAFAFTGNSKGKDINTIKSLRVLRVLRPLKTIKRLPKLKAVFDCVVNSLKNVFNILIVYMLFMFIFAVVAVQLFKGKFFHCTDESKEFEKDCRGKYLLYEKNEVKARDREWKKYEFHYDNVLWALLTLFTVSTGEGWPQVLKHSVDATFENQGPSPGYRMEMSIFYVVYFVVFPFFFVNIFVALIIITFQEQGDKMMEEYSLEKNERACIDFAISAKPLTRHMPQNKQSFQYRMWQFVVSPPFEYTIMAMIALNTIVLMMKFYGASVAYENALRVFNIVFTSLFSLECVLKVMAFGILNYFRDAWNIFDFVTVLGSITDILVTEFGNNFINLSFLRLFRAARLIKLLRQGYTIRILLWTFVQSFK corresponding to amino acids 107-1690 of CCAA_HUMAN, which also corresponds to amino acids 24-1607 of T59742_P9, and a third amino acid sequence being at least 70%, optionally at least 80%, preferably at least 85%, more preferably at least 90% and most preferably at least 95% homologous to a polypeptide having the sequence (SEQ ID NO: 94) CPTPTTRHTHTHTRSQTHTRVLAGYTKPYYYCLQKSI corresponding to amino acids 1608-1644 of T59742_P9, wherein said first amino acid sequence, second amino acid sequence and third amino acid sequence are contiguous and in a sequential order.

[0252] According to preferred embodiments of the present invention, there is provided an isolated polypeptide encoding for a head of T59742_P9, comprising a polypeptide being at least 70%, optionally at least about 80%, preferably at least about 85%, more preferably at least about 90% and most preferably at least about 95% homologous to the sequence (SEQ ID NO: 95) MSSWPTRPTKSTAPPRPGGKNGT of T59742_P9.

[0253] According to preferred embodiments of the present invention, there is provided an isolated polypeptide encoding for a tail of T59742_P9, comprising a polypeptide being at least 70%, optionally at least about 80%, preferably at least about 85%, more preferably at least about 90% and most preferably at least about 95% homologous to the sequence (SEQ ID NO: 96) CPTPTTRHTHTHTRSQTHTRVLAGYTKPYYYCLQKSI in T59742_P9.

[0254] Domains affected by alternative splicing include the cytoplasmic N-terminus region of the protein; the S1 transmembrane domain of domain I; the S5 transmembrane domain of domain IV; the pore loop region between S5 and S6 transmembrane domains of domain IV; the S6 transmembrane domain of domain IV; the cytoplasmic C-terminus region of the protein.

[0255] The effect of these changes is described with regard to Examples 2-6 above.

[0256] From the above description of the effect of changes to the C-terminus domain of this variant, it is expected that the variant has greater current amplitude as compared to the known protein and a stronger calcium dependence of inactivation.

Sequence name: CCAA_HUMAN

documentation:

of: T59742_P9 (residues 24-1607 of SEQ ID NO: 15)×CCAA_HUMAN (SEQ ID NO: 97). . .

segment 1/1:

[0257] Quality: `15581.00

Escore:

Matching length: 1584 Total

length: 1584

Matching Percent Similaritya: 100.00 Matching Percent

Identity: 100.00

Total Percent Similarityu: 100.00 Total Percent

Identity; 100.00

[0258] Gaps: 0

| | . . . . . | |
|---|---|---|
| 24 | TIIANCIVLALEQHLPDDDKTPMSERLDDTEPYFIGIFCFEAGIKIIALG | 73 |
| | \|\|\|\|\|\|\|\|\|\|\|\|\|\|\|\|\|\|\|\|\|\|\|\|\|\|\|\|\|\|\|\|\|\|\|\|\|\|\|\|\|\|\|\|\|\|\|\|\|\| | |
| 107 | TIIANCIVLALEQHLPDDDKTPMSERLDDTEPYFIGIFCFEAGIKIIALG | 156 |
| | . . . . . | |
| 74 | FAFHKGSYLRNGWNVMDFVVVLTGILATVGTEFDLRTLRAVRVLRPLKLV | 123 |
| | \|\|\|\|\|\|\|\|\|\|\|\|\|\|\|\|\|\|\|\|\|\|\|\|\|\|\|\|\|\|\|\|\|\|\|\|\|\|\|\|\|\|\|\|\|\|\|\|\|\| | |
| 157 | FAFHKGSYLRNGWNVMDFVVVLTGILATVGTEFDLRTLRAVRVLRPLKLV | 206 |
| | . . . . . | |
| 124 | SGIPSLQVVLKSIMKAMIPLLQIGLLLFFAILIFAIIGLEFYMGKFHTTC | 173 |
| | \|\|\|\|\|\|\|\|\|\|\|\|\|\|\|\|\|\|\|\|\|\|\|\|\|\|\|\|\|\|\|\|\|\|\|\|\|\|\|\|\|\|\|\|\|\|\|\|\|\| | |
| 207 | SGIPSLQVVLKSIMKAMIPLLQIGLLLFFAILIFAIIGLEFYMGKFHTTC | 256 |
| | . . . . . | |
| 174 | FEEGTDDIQGESPAPCGTEEPARTCPNGTKCQPYWEGPNNGITQFDNILF | 223 |
| | \|\|\|\|\|\|\|\|\|\|\|\|\|\|\|\|\|\|\|\|\|\|\|\|\|\|\|\|\|\|\|\|\|\|\|\|\|\|\|\|\|\|\|\|\|\|\|\|\|\| | |
| 257 | FEEGTDDIQGESPAPCGTEEPARTCPNGTKCQPYWEGPNNGITQFDNILF | 306 |
| | . . . . . | |
| 224 | AVLTVFQCITMEGWTDLLYNSNDASGNTWNWLYFIPLIIIGSFFMLNLVL | 273 |
| | \|\|\|\|\|\|\|\|\|\|\|\|\|\|\|\|\|\|\|\|\|\|\|\|\|\|\|\|\|\|\|\|\|\|\|\|\|\|\|\|\|\|\|\|\|\|\|\|\|\| | |
| 307 | AVLTVFQCITMEGWTDLLYNSNDASGNTWNWLYFIPLIIIGSFFMLNLVL | 356 |
| | . . . . . | |
| 274 | GVLSGEFAKERERVENRRAFLKLRRQQQIERELNGYMEWISKAEEVILAE | 323 |
| | \|\|\|\|\|\|\|\|\|\|\|\|\|\|\|\|\|\|\|\|\|\|\|\|\|\|\|\|\|\|\|\|\|\|\|\|\|\|\|\|\|\|\|\|\|\|\|\|\|\| | |
| 357 | GVLSGEFAKERERVENRRAFLKLRRQQQIERELNGYMEWISKAEEVILAE | 406 |
| | . . . . . | |
| 324 | DETDGEQRHPFDGALRRTTIKKSKTDLLNPEEAEDQLADIASVGSPFARA | 373 |
| | \|\|\|\|\|\|\|\|\|\|\|\|\|\|\|\|\|\|\|\|\|\|\|\|\|\|\|\|\|\|\|\|\|\|\|\|\|\|\|\|\|\|\|\|\|\|\|\|\|\| | |
| 407 | DETDGEQRHPFDGALRRTTIKKSKTDLLNPEEAEDQLADIASVGSPFARA | 456 |
| | . . . . . | |
| 374 | SIKSAKLENSTFFHKKERRMRFYIRRMVKTQAFYWTVLSLVALNTLCVAI | 423 |
| | \|\|\|\|\|\|\|\|\|\|\|\|\|\|\|\|\|\|\|\|\|\|\|\|\|\|\|\|\|\|\|\|\|\|\|\|\|\|\|\|\|\|\|\|\|\|\|\|\|\| | |
| 457 | SIKSAKLENSTFFHKKERRMRFYIRRMVKTQAFYWTVLSLVALNTLCVAI | 506 |
| | . . . . . | |
| 424 | VHYNQPEWLSDFLYYAEFIFLGLFMSEMFIKMYGLGTRPYFHSSFNCFDC | 473 |
| | \|\|\|\|\|\|\|\|\|\|\|\|\|\|\|\|\|\|\|\|\|\|\|\|\|\|\|\|\|\|\|\|\|\|\|\|\|\|\|\|\|\|\|\|\|\|\|\|\|\| | |
| 507 | VHYNQPEWLSDFLYYAEFIFLGLFMSEMFIKMYGLGTRPYFHSSFNCFDC | 556 |
| | . . . . . | |
| 474 | GVIIGSIFEVIWAVIKPGTSFGISVLRALRLLRIFKVTKYWASLRNLVVS | 523 |
| | \|\|\|\|\|\|\|\|\|\|\|\|\|\|\|\|\|\|\|\|\|\|\|\|\|\|\|\|\|\|\|\|\|\|\|\|\|\|\|\|\|\|\|\|\|\|\|\|\|\| | |
| 557 | GVIIGSIFEVIWAVIKPGTSFGISVLRALRLLRIFKVTKYWASLRNLVVS | 606 |
| | . . . . . | |
| 524 | LLNSMKSIISLLFLLFLFIVVFALLGMQLFGGQFNFDEGTPPTNFDTFPA | 573 |
| | \|\|\|\|\|\|\|\|\|\|\|\|\|\|\|\|\|\|\|\|\|\|\|\|\|\|\|\|\|\|\|\|\|\|\|\|\|\|\|\|\|\|\|\|\|\|\|\|\|\| | |
| 607 | LLNSMKSIISLLFLLFLFIVVFALLGMQLFGGQFNFDEGTPPTNFDTFPA | 656 |
| | . . . . . | |
| 574 | AIMTVFQILTGEDWNEVMYDGIKSQGGVQGGMVFSIYFIVLTLFGNYTLL | 623 |
| | \|\|\|\|\|\|\|\|\|\|\|\|\|\|\|\|\|\|\|\|\|\|\|\|\|\|\|\|\|\|\|\|\|\|\|\|\|\|\|\|\|\|\|\|\|\|\|\|\|\| | |
| 657 | AIMTVFQILTGEDWNEVMYDGIKSQGGVQGGMVFSIYFIVLTLFGNYTLL | 706 |
| | . . . . . | |
| 624 | NVFLAIAVDNLANAQELTKDEQEEEEAANQKLALQKAKEVAEVSPLSAAN | 673 |
| | \|\|\|\|\|\|\|\|\|\|\|\|\|\|\|\|\|\|\|\|\|\|\|\|\|\|\|\|\|\|\|\|\|\|\|\|\|\|\|\|\|\|\|\|\|\|\|\|\|\| | |
| 707 | NVFLAIAVDNLANAQELTKDEQEEEEAANQKLALQKAKEVAEVSPLSAAN | 756 |
| | . . . . . | |
| 674 | MSIAVKEQQKNQKPAKSVWEQRTSEMRKQNLLASREALYNEMDPDERWKA | 723 |
| | \|\|\|\|\|\|\|\|\|\|\|\|\|\|\|\|\|\|\|\|\|\|\|\|\|\|\|\|\|\|\|\|\|\|\|\|\|\|\|\|\|\|\|\|\|\|\|\|\|\| | |
| 757 | MSIAVKEQQKNQKPAKSVWEQRTSEMRKQNLLASREALYNEMDPDERWKA | 806 |
| | . . . . . | |
| 724 | AYTRHLRPDMKTHLDRPLVVDPQENRNNNTNKSRAAEPTVDQRLGQQRAE | 773 |
| | \|\|\|\|\|\|\|\|\|\|\|\|\|\|\|\|\|\|\|\|\|\|\|\|\|\|\|\|\|\|\|\|\|\|\|\|\|\|\|\|\|\|\|\|\|\|\|\|\|\| | |
| 807 | AYTRHLRPDMKTHLDRPLVVDPQENRNNNTNKSRAAEPTVDQRLGQQRAE | 856 |
| | . . . . . | |
| 774 | DFLRKQARYHDRARDPSGSAGLDARRPWAGSQEAELSREGPYGRESDHHA | 823 |
| | \|\|\|\|\|\|\|\|\|\|\|\|\|\|\|\|\|\|\|\|\|\|\|\|\|\|\|\|\|\|\|\|\|\|\|\|\|\|\|\|\|\|\|\|\|\|\|\|\|\| | |
| 857 | DFLRKQARYHDRARDPSGSAGLDARRPWAGSQEAELSREGPYGRESDHHA | 906 |
| | . . . . . | |
| 824 | REGSLEQPGFWEGEAERGKAGDPHRRHVHRQGGSRESRSGSPRTGADGEH | 873 |
| | \|\|\|\|\|\|\|\|\|\|\|\|\|\|\|\|\|\|\|\|\|\|\|\|\|\|\|\|\|\|\|\|\|\|\|\|\|\|\|\|\|\|\|\|\|\|\|\|\|\| | |
| 907 | REGSLEQPGFWEGEAERGKAGDPHRRHVHRQGGSRESRSGSPRTGADGEH | 956 |
| | . . . . . | |
| 874 | RRHRAHRRPGEEGPEDKAERRARHREGSRPARGGEGEGEGPDGGERRRRH | 923 |
| | \|\|\|\|\|\|\|\|\|\|\|\|\|\|\|\|\|\|\|\|\|\|\|\|\|\|\|\|\|\|\|\|\|\|\|\|\|\|\|\|\|\|\|\|\|\|\|\|\|\| | |
| 957 | RRHRAHRRPGEEGPEDKAERRARHREGSRPARGGEGEGEGPDGGERRRRH | 1006 |
| | . . . . . | |
| 924 | RHGAPATYEGDARREDKERRHRRRKENQGSGVPVSGPNLSTTRPIQQDLG | 973 |
| | \|\|\|\|\|\|\|\|\|\|\|\|\|\|\|\|\|\|\|\|\|\|\|\|\|\|\|\|\|\|\|\|\|\|\|\|\|\|\|\|\|\|\|\|\|\|\|\|\|\| | |
| 1007 | RHGAPATYEGDARREDKERRHRRRKENQGSGVPVSGPNLSTTRPIQQDLG | 1056 |
| | . . . . . | |
| 974 | RQDPPLAEDIDNMKNNKLATAESAAPHGSLGHAGLPQSPAKMGNSTDPGP | 1023 |
| | \|\|\|\|\|\|\|\|\|\|\|\|\|\|\|\|\|\|\|\|\|\|\|\|\|\|\|\|\|\|\|\|\|\|\|\|\|\|\|\|\|\|\|\|\|\|\|\|\|\| | |
| 1057 | RQDPPLAEDIDNMKNNKLATAESAAPHGSLGHAGLPQSPAKMGNSTDPGP | 1106 |
| | . . . . . | |
| 1024 | MLAIPAMATNPQNAASRRTPNNPGNPSNPGPPKTPENSLIVTNPSGTQTN | 1073 |
| | \|\|\|\|\|\|\|\|\|\|\|\|\|\|\|\|\|\|\|\|\|\|\|\|\|\|\|\|\|\|\|\|\|\|\|\|\|\|\|\|\|\|\|\|\|\|\|\|\|\| | |
| 1107 | MLAIPAMATNPQNAASRRTPNNPGNPSNPGPPKTPENSLIVTNPSGTQTN | 1156 |
| | . . . . . | |
| 1074 | SAKTARKPDHTTVDIPPACPPPLNHTVVQVNKNANPDPLPKKEEEKKEEE | 1123 |
| | \|\|\|\|\|\|\|\|\|\|\|\|\|\|\|\|\|\|\|\|\|\|\|\|\|\|\|\|\|\|\|\|\|\|\|\|\|\|\|\|\|\|\|\|\|\|\|\|\|\| | |
| 1157 | SAKTARKPDHTTVDIPPACPPPLNHTVVQVNKNANPDPLPKKEEEKKEEE | 1206 |
| | . . . . . | |
| 1124 | EDDRGEDGPKPMPPYSSMFILSTTNPLRRLCHYILNLRYFEMCILMVIAM | 1173 |
| | \|\|\|\|\|\|\|\|\|\|\|\|\|\|\|\|\|\|\|\|\|\|\|\|\|\|\|\|\|\|\|\|\|\|\|\|\|\|\|\|\|\|\|\|\|\|\|\|\|\| | |
| 1207 | EDDRGEDGPKPMPPYSSMFILSTTNPLRRLCHYILNLRYFEMCILMVIAM | 1256 |
| | . . . . . | |
| 1174 | SSIALAAEDPVQPNAPRNNVLRYFDYVFTGVFTFEMVIKMIDLGLVLHQG | 1223 |
| | \|\|\|\|\|\|\|\|\|\|\|\|\|\|\|\|\|\|\|\|\|\|\|\|\|\|\|\|\|\|\|\|\|\|\|\|\|\|\|\|\|\|\|\|\|\|\|\|\|\| | |
| 1257 | SSIALAAEDPVQPNAPRNNVLRYFDYVFTGVFTFEMVIKMIDLGLVLHQG | 1306 |
| | . . . . . | |
| 1224 | AYFRDLWNILDFIVVSGALVAFAFTGNSKGKDINTIKSLRVLRVLRPLKT | 1273 |
| | \|\|\|\|\|\|\|\|\|\|\|\|\|\|\|\|\|\|\|\|\|\|\|\|\|\|\|\|\|\|\|\|\|\|\|\|\|\|\|\|\|\|\|\|\|\|\|\|\|\| | |
| 1307 | AYFRDLWNILDFIVVSGALVAFAFTGNSKGKDINTIKSLRVLRVLRPLKT | 1356 |
| | . . . . . | |
| 1274 | IKRLPKLKAVFDCVVNSLKNVFNILIVYMLFMFIFAVVAVQLFKGKFFHC | 1323 |
| | \|\|\|\|\|\|\|\|\|\|\|\|\|\|\|\|\|\|\|\|\|\|\|\|\|\|\|\|\|\|\|\|\|\|\|\|\|\|\|\|\|\|\|\|\|\|\|\|\|\| | |
| 1357 | IKRLPKLKAVFDCVVNSLKNVFNILIVYMLFMFIFAVVAVQLFKGKFFHC | 1406 |
| | . . . . . | |
| 1324 | TDESKEFEKDCRGKYLLYEKNEVKARDREWKKYEFHYDNVLWALLTLFTV | 1373 |
| | \|\|\|\|\|\|\|\|\|\|\|\|\|\|\|\|\|\|\|\|\|\|\|\|\|\|\|\|\|\|\|\|\|\|\|\|\|\|\|\|\|\|\|\|\|\|\|\|\|\| | |
| 1407 | TDESKEFEKDCRGKYLLYEKNEVKARDREWKKYEFHYDNVLWALLTLFTV | 1456 |
| | . . . . . | |
| 1374 | STGEGWPQVLKHSVDATFENQGPSPGYRMEMSIFYVVYFVVFPFFFVNIF | 1423 |
| | \|\|\|\|\|\|\|\|\|\|\|\|\|\|\|\|\|\|\|\|\|\|\|\|\|\|\|\|\|\|\|\|\|\|\|\|\|\|\|\|\|\|\|\|\|\|\|\|\|\| | |
| 1457 | STGEGWPQVLKHSVDATFENQGPSPGYRMEMSIFYVVYFVVFPFFFVNIF | 1506 |
| | . . . . . | |
| 1424 | VALIIITFQEQGDKMMEEYSLEKNERACIDFAISAKPLTRHMPQNKQSFQ | 1473 |
| | \|\|\|\|\|\|\|\|\|\|\|\|\|\|\|\|\|\|\|\|\|\|\|\|\|\|\|\|\|\|\|\|\|\|\|\|\|\|\|\|\|\|\|\|\|\|\|\|\|\| | |
| 1507 | VALIIITFQEQGDKMMEEYSLEKNERACIDFAISAKPLTRHMPQNKQSFQ | 1556 |
| | . . . . . | |
| 1474 | YRMWQFVVSPPFEYTIMAMIALNTIVLMMKFYGASVAYENALRVFNIVFT | 1523 |
| | \|\|\|\|\|\|\|\|\|\|\|\|\|\|\|\|\|\|\|\|\|\|\|\|\|\|\|\|\|\|\|\|\|\|\|\|\|\|\|\|\|\|\|\|\|\|\|\|\|\| | |
| 1557 | YRMWQFVVSPPFEYTIMAMIALNTIVLMMKFYGASVAYENALRVFNIVFT | 1606 |
| | . . . . . | |
| 1524 | SLFSLECVLKVMAFGILNYFRDAWNIFDFVTVLGSITDILVTEFGNNFIN | 1573 |
| | \|\|\|\|\|\|\|\|\|\|\|\|\|\|\|\|\|\|\|\|\|\|\|\|\|\|\|\|\|\|\|\|\|\|\|\|\|\|\|\|\|\|\|\|\|\|\|\|\|\| | |
| 1607 | SLFSLECVLKVMAFGILNYFRDAWNIFDFVTVLGSITDILVTEFGNNFIN | 1656 |
| | . . . | |
| 1574 | LSFLRLFRAARLIKLLRQGYTIRILLWTFVQSFK | 1607 |
| | \|\|\|\|\|\|\|\|\|\|\|\|\|\|\|\|\|\|\|\|\|\|\|\|\|\|\|\|\|\|\|\|\|\| | |
| 1657 | LSFLRLFRAARLIKLLRQGYTIRILLWTFVQSFK | 1690 |

### EXAMPLE 8

[0259] This Example relates to the variant AA019974_P4 (SEQ ID NO:17; the nucleic acid sequence is given by SEQ ID NO:39), which is a variant alpha 1 subunit according to the present invention, and more specifically, is a splice variant of the known protein CCAF_HUMAN, which is encoded by the CACNA1F gene. This protein is an alpha 1F subunit, which forms a voltage-dependent L-type calcium channel. The subunit is also known as an alpha subunit Cav1.4.

[0260] The isoform alpha-1F is found in L-type calcium channels, which belong to the “high-voltage activated” (HVA) group. They are blocked by dihydropyridines (DHP), phenylalkylamines, benzothiazepines, and by omega-agatoxin-IIIA (omega-Aga-IIIA), but are insensitive to certain other toxins.

[0261] This particular alpha subunit is typically found in skeletal muscle and retina. It has the following structure: each of the four internal repeats contains five hydrophobic transmembrane segments (S1, S2, S3, S5, S6) and one positively charged transmembrane segment (S4). S4 segments probably represent the voltage-sensor and are characterized by a series of positively charged amino acids at every third position.

[0262] Defects in the CACNA1F gene are the cause of incomplete X-linked congenital stationary night blindness type 2 (CSNB2). CSNB2 is a nonprogressive retinal disorder characterized by decreased visual acuity and loss of night vision.

[0263] The structure of the splice variant according to the present invention features a unique insertion and a unique tail, as compared to the known protein sequence. An alignment is provided at the end of this section, while the comparison between the two sequences is described below.

[0264] According to preferred embodiments of the present invention, there is provided an isolated chimeric polypeptide encoding for AA019974_P4, comprising a first amino acid sequence being at least 90% homologous to (SEQ ID NO: 98) MSESEGGKDTTPEPSPANGAGPGPEWGLCPGPPAVEGESSGASGLGTPKRRNQHSKHKTVAVASAQRSPRALFCLTLANPLRRSCISIVEWKPFDILILLTIFANCVALGVYIPFPEDDSNTANHNLEQVEYVFLVIFTVETVLKIVAYGLVLHPSAYIRNGWNLLDFIIVVVGLFSVLLEQGPGRPGDAPHTGGKPGGFDVKALRAFRVLRPLRLVSGVPSLHIVLNSIMKALVPLLHIALLVLFVIIIYAIIGLELFLGRMHKTCYFLGSDMEAEEDPSPCASSGSGRACTLNQTECRGRWPGPNGGITNFDNFFFAMLTVFQCVTMEGWTDVLYWMQDAMGYELPWVYFVSLVIFGSFFVLNLVLGVLSGEFSKEREKAKARGDFQKQREKQQMEEDLRGYLDWITQAEELDMEDPSADDNLG corresponding to amino acids 1-426 of CCAF_HUMAN, which also corresponds to amino acids 1-426 of AA019974_P4, a second amino acid sequence being at least 70%, optionally at least 80%, preferably at least 85%, more preferably at least 90% and most preferably at least 95% homologous to a polypeptide having the sequence (SEQ ID NO: 99) SMAEEGRAGHR corresponding to amino acids 427-437 of AA019974_P4, a third amino acid sequence being at least 90% homologous to (SEQ ID NO: 100) PQLAELTNRRRGRLRWFSHSTRSTHSTSSHASLPASDTGSMTETQGDEDEEEGALASCTRCLNKIMKTRVCRRLRRANRVLRARCRRAVKSNACYWAVLLLVFLNTLTIASEHHGQPVWLTQIQEYANKVLLCLFTVEMLLKLYGLGPSAYVSSFFNRFDCFVVCGGILETTLVEVGAMQPLGISVLRCVRLLRIFKVTRHWASLSNLVASLLNSMKSIASLLLLLFLFIIIFSLLGMQLFGGKFNFDQTHTKRSTFDTFPQALLTVFQILTGEDWNVVMYDGIMAYGGPFFPGMLVCIYFIILFICGNYILLNVFLAIAVDNLASGDAGTAKDKGGEKSNEKDLPQENEGLVPGVEKEEEEGARREGADMEEEEEEEEEEEEEEEEEGAGGVELLQEVVPKEKVVPIPEGSAFFCLSQTNPLRKGCHTLIHHHVFTNLILVFIILSSVSLAAEDPIRAHSFRNHILGYFDYAFTSIFTVEILLKMTVFGAFLHRGSFCRSWFNMLDLLVVSVSLISFGIHSSAISVVKILRVLRVLRPLRAINRAKGLKHVVQCVFVAIRTIGNIMIVTTLLQFMFACIGVQLFKGKFYTCTDEAKHTPQECKGSFLVYPDGDVSRPLVRERLWVNSDFNFDNVLSAMMALFTVSTFEGWPALLYKAIDAYAEDHGPIYNYRVEISVFFIVYIIIIAFFMMNIFVGFVIITFRAQGEQEYQNCELDKNQRQCVEYALKAQPLRRYIPKNPHQYRVWATVNSAAFEYLMFLLILLNTVALAMQHYEQTAPFNYAMDILNMVFTGLFTIEMVLKIIAFKPKHYFTDAWNTFDALIVVGSIVDIAVTEVNNGGHLGESSEDSSRISITFFRLFRVMRLVKLLSKGEGIRTLLWTFIKSFQALPYVALLIAMIFFIYAVIGMQMFGKVALQDGTQINRNNNFQTFPQAVLLLFRCATGEAWQEIMLASLPGNRCDPESDFGPGEEFTCGSNFAIAYFISFFMLCAFLIINLFVAVIMDNFDYLTRDWSILGPHHLDEFKRIWSEYDPGAK corresponding to amino acids 427-1463 of CCAF_HUMAN, which also corresponds to amino acids 438-1474 of AA019974_P4, and a fourth amino acid sequence being at least 70%, optionally at least 80%, preferably at least 85%, more preferably at least 90% and most preferably at least 95% homologous to a polypeptide having the sequence (SEQ ID NO: 101) YALYTLT corresponding to amino acids 1475-1481 of AA019974_P4, wherein said first amino acid sequence, second amino acid sequence, third amino acid sequence and fourth amino acid sequence are contiguous and in a sequential order.

[0265] According to preferred embodiments of the present invention, there is provided an isolated polypeptide encoding for an edge portion (unique insertion) of AA019974_P4, comprising an amino acid sequence being at least 70%, optionally at least about 80%, preferably at least about 85%, more preferably at least about 90% and most preferably at least about 95% homologous to the sequence encoding for (SEQ ID NO: 102) SMAEEGRAGHR, corresponding to AA019974_P4.

[0266] According to preferred embodiments of the present invention, there is provided an isolated polypeptide encoding for a tail of AA019974_P4, comprising a polypeptide being at least 70%, optionally at least about 80%, preferably at least about 85%, more preferably at least about 90% and most preferably at least about 95% homologous to the sequence (SEQ ID NO: 103) YALYTLT in AA019974_P4.

[0267] Domains affected by alternative splicing include the cytoplasmic loop between domain I and domain II, and the cytoplasmic C-terminus region of the protein.

[0268] This loop is an important point of interaction of G-beta-gamma with Ca⁺² channels, and this interaction may determine G protein specificity for modulation. The effect of these changes on the C-terminus region may be found with regard to Example 2.

[0269] From the above description of the effect of changes to the C-terminus domain of this variant, it is expected that the variant has an increase of current amplitude without change of voltage dependence of gating. It is also expected to modulate the Ca⁺²-dependent inactivation of the channel.

[0270] In addition, the changes in the cytoplasmic loop between domain I and domain II may result in changes in the G protein specificity for modulation.

Sequence name: CCAF_HUMAN

docuemtation:

of: AA019974_P4 (residues 1-1474 of SEQ ID NO: 17)×CCAF_HUMAN (SEQ ID NO: 104) . . .

segment 1/1:

[0271] Quality: 14184.00

Escore: 0

Matching length: 1463 Total

length: 1474

Matching Percent Similarity: 100.00 Matching Percent

Identity: 100.00

Total Percent Similarity: 99.25 Total Percent

Identity: 99.25

[0272] Gaps: 1

| | . . . . . | |
|---|---|---|
| 1 | MSESEGGKDTTPEPSPANGAGPGPEWGLCPGPPAVEGESSGASGLGTPKR | 50 |
| | \|\|\|\|\|\|\|\|\|\|\|\|\|\|\|\|\|\|\|\|\|\|\|\|\|\|\|\|\|\|\|\|\|\|\|\|\|\|\|\|\|\|\|\|\|\|\|\|\|\| | |
| 1 | MSESEGGKDTTPEPSPANGAGPGPEWGLCPGPPAVEGESSGASGLGTPKR | 50 |
| | . . . . . | |
| 51 | RNQHSKHKTVAVASAQRSPRALFCLTLANPLRRSCISIVEWKPFDILILL | 100 |
| | \|\|\|\|\|\|\|\|\|\|\|\|\|\|\|\|\|\|\|\|\|\|\|\|\|\|\|\|\|\|\|\|\|\|\|\|\|\|\|\|\|\|\|\|\|\|\|\|\|\| | |
| 51 | RNQHSKHKTVAVASAQRSPRALFCLTLANPLRRSCISIVEWKPFDILILL | 100 |
| | . . . . . | |
| 101 | TIFANCVALGVYIPFPEDDSNTANHNLEQVEYVFLVIFTVETVLKIVAYG | 150 |
| | \|\|\|\|\|\|\|\|\|\|\|\|\|\|\|\|\|\|\|\|\|\|\|\|\|\|\|\|\|\|\|\|\|\|\|\|\|\|\|\|\|\|\|\|\|\|\|\|\|\| | |
| 101 | TIFANCVALGVYIPFPEDDSNTANHNLEQVEYVFLVIFTVETVLKIVAYG | 150 |
| | . . . . . | |
| 151 | LVLHPSAYIRNGWNLLDFIIVVVGLFSVLLEQGPGRPGDAPHTGGKPGGF | 200 |
| | \|\|\|\|\|\|\|\|\|\|\|\|\|\|\|\|\|\|\|\|\|\|\|\|\|\|\|\|\|\|\|\|\|\|\|\|\|\|\|\|\|\|\|\|\|\|\|\|\|\| | |
| 151 | LVLHPSAYIRNGWNLLDFIIVVVGLFSVLLEQGPGRPGDAPHTGGKPGGF | 200 |
| | . . . . . | |
| 201 | DVKALRAFRVLRPLRLVSGVPSLHIVLNSIMKALVPLLHIALLVLFVIII | 250 |
| | \|\|\|\|\|\|\|\|\|\|\|\|\|\|\|\|\|\|\|\|\|\|\|\|\|\|\|\|\|\|\|\|\|\|\|\|\|\|\|\|\|\|\|\|\|\|\|\|\|\| | |
| 201 | DVKALRAFRVLRPLRLVSGVPSLHIVLNSIMKALVPLLHIALLVLFVIII | 250 |
| | . . . . . | |
| 251 | YAIIGLELFLGRMHKTCYFLGSDMEAEEDPSPCASSGSGRACTLNQTECR | 300 |
| | \|\|\|\|\|\|\|\|\|\|\|\|\|\|\|\|\|\|\|\|\|\|\|\|\|\|\|\|\|\|\|\|\|\|\|\|\|\|\|\|\|\|\|\|\|\|\|\|\|\| | |
| 251 | YAIIGLELFLGRMHKTCYFLGSDMEAEEDPSPCASSGSGRACTLNQTECR | 300 |
| | . . . . . | |
| 301 | GRWPGPNGGITNFDNFFFAMLTVFQCVTMEGWTDVLYWMQDAMGYELPWV | 350 |
| | \|\|\|\|\|\|\|\|\|\|\|\|\|\|\|\|\|\|\|\|\|\|\|\|\|\|\|\|\|\|\|\|\|\|\|\|\|\|\|\|\|\|\|\|\|\|\|\|\|\| | |
| 301 | GRWPGPNGGITNFDNFFFAMLTVFQCVTMEGWTDVLYWMQDAMGYELPWV | 350 |
| | . . . . . | |
| 351 | YFVSLVIFGSFFVLNLVLGVLSGEFSKEREKAKARGDFQKQREKQQMEED | 400 |
| | \|\|\|\|\|\|\|\|\|\|\|\|\|\|\|\|\|\|\|\|\|\|\|\|\|\|\|\|\|\|\|\|\|\|\|\|\|\|\|\|\|\|\|\|\|\|\|\|\|\| | |
| 351 | YFVSLVIFGSFFVLNLVLGVLSGEFSKEREKAKARGDFQKQREKQQMEED | 400 |
| | . . . . . | |
| 401 | LRGYLDWITQAEELDMEDPSADDNLGSMAEEGRAGHRPQLAELTNRRRGR | 450 |
| | \|\|\|\|\|\|\|\|\|\|\|\|\|\|\|\|\|\|\|\|\|\|\|\|\|\| \|\|\|\|\|\|\|\|\|\|\|\|\| | |
| 401 | LRGYLDWITQAEELDMEDPSADDNLG...........PQLAELTNRRRGR | 439 |
| | . . . . . | |
| 451 | LRWFSHSTRSTHSTSSHASLPASDTGSMTETQGDEDEEEGALASCTRCLN | 500 |
| | \|\|\|\|\|\|\|\|\|\|\|\|\|\|\|\|\|\|\|\|\|\|\|\|\|\|\|\|\|\|\|\|\|\|\|\|\|\|\|\|\|\|\|\|\|\|\|\|\|\| | |
| 440 | LRWFSHSTRSTHSTSSHASLPASDTGSMTETQGDEDEEEGALASCTRCLN | 489 |
| | . . . . . | |
| 501 | KIMKTRVCRRLRRANRVLRARCRRAVKSNACYWAVLLLVFLNTLTIASEH | 550 |
| | \|\|\|\|\|\|\|\|\|\|\|\|\|\|\|\|\|\|\|\|\|\|\|\|\|\|\|\|\|\|\|\|\|\|\|\|\|\|\|\|\|\|\|\|\|\|\|\|\|\| | |
| 490 | KIMKTRVCRRLRRANRVLRARCRRAVKSNACYWAVLLLVFLNTLTIASEH | 539 |
| | . . . . . | |
| 551 | HGQPVWLTQIQEYANKVLLCLFTVEMLLKLYGLGPSAYVSSFFNRFDCFV | 600 |
| | \|\|\|\|\|\|\|\|\|\|\|\|\|\|\|\|\|\|\|\|\|\|\|\|\|\|\|\|\|\|\|\|\|\|\|\|\|\|\|\|\|\|\|\|\|\|\|\|\|\| | |
| 540 | HGQPVWLTQIQEYANKVLLCLFTVEMLLKLYGLGPSAYVSSFFNRFDCFV | 589 |
| | . . . . . | |
| 601 | VCGGILETTLVEVGAMQPLGISVLRCVRLLRIFKVTRHWASLSNLVASLL | 650 |
| | \|\|\|\|\|\|\|\|\|\|\|\|\|\|\|\|\|\|\|\|\|\|\|\|\|\|\|\|\|\|\|\|\|\|\|\|\|\|\|\|\|\|\|\|\|\|\|\|\|\| | |
| 590 | VCGGILETTLVEVGAMQPLGISVLRCVRLLRIFKVTRHWASLSNLVASLL | 639 |
| | . . . . . | |
| 651 | NSMKSIASLLLLLFLFIIIFSLLGMQLFGGKFNFDQTHTKRSTFDTFPQA | 700 |
| | \|\|\|\|\|\|\|\|\|\|\|\|\|\|\|\|\|\|\|\|\|\|\|\|\|\|\|\|\|\|\|\|\|\|\|\|\|\|\|\|\|\|\|\|\|\|\|\|\|\| | |
| 640 | NSMKSIASLLLLLFLFIIIFSLLGMQLFGGKFNFDQTHTKRSTFDTFPQA | 689 |
| | . . . . . | |
| 701 | LLTVFQILTGEDWNVVMYDGIMAYGGPFFPGMLVCIYFIILFICGNYILL | 750 |
| | \|\|\|\|\|\|\|\|\|\|\|\|\|\|\|\|\|\|\|\|\|\|\|\|\|\|\|\|\|\|\|\|\|\|\|\|\|\|\|\|\|\|\|\|\|\|\|\|\|\| | |
| 690 | LLTVFQILTGEDWNVVMYDGIMAYGGPFFPGMLVCIYFIILFICGNYILL | 739 |
| | . . . . . | |
| 751 | NVFLAIAVDNLASGDAGTAKDKGGEKSNEKDLPQENEGLVPGVEKEEEEG | 800 |
| | \|\|\|\|\|\|\|\|\|\|\|\|\|\|\|\|\|\|\|\|\|\|\|\|\|\|\|\|\|\|\|\|\|\|\|\|\|\|\|\|\|\|\|\|\|\|\|\|\|\| | |
| 740 | NVFLAIAVDNLASGDAGTAKDKGGEKSNEKDLPQENEGLVPGVEKEEEEG | 789 |
| | . . . . . | |
| 801 | ARREGADMEEEEEEEEEEEEEEEEEGAGGVELLQEVVPKEKVVPIPEGSA | 850 |
| | \|\|\|\|\|\|\|\|\|\|\|\|\|\|\|\|\|\|\|\|\|\|\|\|\|\|\|\|\|\|\|\|\|\|\|\|\|\|\|\|\|\|\|\|\|\|\|\|\|\| | |
| 790 | ARREGADMEEEEEEEEEEEEEEEEEGAGGVELLQEVVPKEKVVPIPEGSA | 839 |
| | . . . . . | |
| 851 | FFCLSQTNPLRKGCHTLIHHHVFTNLILVFIILSSVSLAAEDPIRAHSFR | 900 |
| | \|\|\|\|\|\|\|\|\|\|\|\|\|\|\|\|\|\|\|\|\|\|\|\|\|\|\|\|\|\|\|\|\|\|\|\|\|\|\|\|\|\|\|\|\|\|\|\|\|\| | |
| 840 | FFCLSQTNPLRKGCHTLIHHHVFTNLILVFIILSSVSLAAEDPIRAHSFR | 889 |
| | . . . . . | |
| 901 | NHILGYFDYAFTSIFTVEILLKMTVFGAFLHRGSFCRSWFNMLDLLVVSV | 950 |
| | \|\|\|\|\|\|\|\|\|\|\|\|\|\|\|\|\|\|\|\|\|\|\|\|\|\|\|\|\|\|\|\|\|\|\|\|\|\|\|\|\|\|\|\|\|\|\|\|\|\| | |
| 890 | NHILGYFDYAFTSIFTVEILLKMTVFGAFLHRGSFCRSWFNMLDLLVVSV | 939 |
| | . . . . . | |
| 951 | SLISFGIHSSAISVVKILRVLRVLRPLRAINRAKGLKHVVQCVFVAIRTI | 1000 |
| | \|\|\|\|\|\|\|\|\|\|\|\|\|\|\|\|\|\|\|\|\|\|\|\|\|\|\|\|\|\|\|\|\|\|\|\|\|\|\|\|\|\|\|\|\|\|\|\|\|\| | |
| 940 | SLISFGIHSSAISVVKILRVLRVLRPLRAINRAKGLKHVVQCVFVAIRTI | 989 |
| | . . . . . | |
| 1001 | GNIMIVTTLLQFMFACIGVQLFKGKFYTCTDEAKHTPQECKGSFLVYPDG | 1050 |
| | \|\|\|\|\|\|\|\|\|\|\|\|\|\|\|\|\|\|\|\|\|\|\|\|\|\|\|\|\|\|\|\|\|\|\|\|\|\|\|\|\|\|\|\|\|\|\|\|\|\| | |
| 990 | GNIMIVTTLLQFMFACIGVQLFKGKFYTCTDEAKHTPQECKGSFLVYPDG | 1039 |
| | . . . . . | |
| 1051 | DVSRPLVRERLWVNSDFNFDNVLSAMMALFTVSTFEGWPALLYKAIDAYA | 1100 |
| | \|\|\|\|\|\|\|\|\|\|\|\|\|\|\|\|\|\|\|\|\|\|\|\|\|\|\|\|\|\|\|\|\|\|\|\|\|\|\|\|\|\|\|\|\|\|\|\|\|\| | |
| 1040 | DVSRPLVRERLWVNSDFNFDNVLSAMMALFTVSTFEGWPALLYKAIDAYA | 1089 |
| | . . . . . | |
| 1101 | EDHGPIYNYRVEISVFFIVYIIIIAFFMMNIFVGFVIITFRAQGEQEYQN | 1150 |
| | \|\|\|\|\|\|\|\|\|\|\|\|\|\|\|\|\|\|\|\|\|\|\|\|\|\|\|\|\|\|\|\|\|\|\|\|\|\|\|\|\|\|\|\|\|\|\|\|\|\| | |
| 1090 | EDHGPIYNYRVEISVFFIVYIIIIAFFMMNIFVGFVIITFRAQGEQEYQN | 1139 |
| | . . . . . | |
| 1151 | CELDKNQRQCVEYALKAQPLRRYIPKNPHQYRVWATVNSAAFEYLMFLLI | 1200 |
| | \|\|\|\|\|\|\|\|\|\|\|\|\|\|\|\|\|\|\|\|\|\|\|\|\|\|\|\|\|\|\|\|\|\|\|\|\|\|\|\|\|\|\|\|\|\|\|\|\|\| | |
| 1140 | CELDKNQRQCVEYALKAQPLRRYIPKNPHQYRVWATVNSAAFEYLMFLLI | 1189 |
| | . . . . . | |
| 1201 | LLNTVALAMQHYEQTAPFNYAMDILNMVFTGLFTIEMVLKIIAFKPKHYF | 1250 |
| | \|\|\|\|\|\|\|\|\|\|\|\|\|\|\|\|\|\|\|\|\|\|\|\|\|\|\|\|\|\|\|\|\|\|\|\|\|\|\|\|\|\|\|\|\|\|\|\|\|\| | |
| 1190 | LLNTVALAMQHYEQTAPFNYAMDILNMVFTGLFTIEMVLKIIAFKPKHYF | 1239 |
| | . . . . . | |
| 1251 | TDAWNTFDALIVVGSIVDIAVTEVNNGGHLGESSEDSSRISITFFRLFRV | 1300 |
| | \|\|\|\|\|\|\|\|\|\|\|\|\|\|\|\|\|\|\|\|\|\|\|\|\|\|\|\|\|\|\|\|\|\|\|\|\|\|\|\|\|\|\|\|\|\|\|\|\|\| | |
| 1240 | TDAWNTFDALIVVGSIVDIAVTEVNNGGHLGESSEDSSRISITFERLFRV | 1289 |
| | . . . . . | |
| 1301 | MRLVKLLSKGEGIRTLLWTFIKSFQALPYVALLIAMIFFIYAVIGMQMFG | 1350 |
| | \|\|\|\|\|\|\|\|\|\|\|\|\|\|\|\|\|\|\|\|\|\|\|\|\|\|\|\|\|\|\|\|\|\|\|\|\|\|\|\|\|\|\|\|\|\|\|\|\|\| | |
| 1290 | MRLVKLLSKGEGIRTLLWTFIKSFQALPYVALLIAMIFFIYAVIGMQMFG | 1339 |
| | . . . . . | |
| 1351 | KVALQDGTQINRNNNFQTFPQAVLLLFRCATGEAWQEIMLASLPGNRCDP | 1400 |
| | \|\|\|\|\|\|\|\|\|\|\|\|\|\|\|\|\|\|\|\|\|\|\|\|\|\|\|\|\|\|\|\|\|\|\|\|\|\|\|\|\|\|\|\|\|\|\|\|\|\| | |
| 1340 | KVALQDGTQINRNNNFQTFPQAVLLLFRCATGEAWQEIMLASLPGNRCDP | 1389 |
| | . . . . . | |
| 1401 | ESDFGPGEEFTCGSNFAIAYFISFFMLCAFLIINLFVAVIMDNFDYLTRD | 1450 |
| | \|\|\|\|\|\|\|\|\|\|\|\|\|\|\|\|\|\|\|\|\|\|\|\|\|\|\|\|\|\|\|\|\|\|\|\|\|\|\|\|\|\|\|\|\|\|\|\|\|\| | |
| 1390 | ESDFGPGEEFTCGSNFAIAYFISFFMLCAFLIINLFVAVIMDNFDYLTRD | 1439 |
| | . . | |
| 1451 | WSILGPHHLDEEKRIWSEYDPGAK | 1474 |
| | \|\|\|\|\|\|\|\|\|\|\|\|\|\|\|\|\|\|\|\|\|\|\|\| | |
| 1440 | WSILGPHHLDEFKRIWSEYDPGAK | 1463 |

### EXAMPLE 9

[0273] This Example relates to the variant R12947_P13 (SEQ ID NO:18; the nucleic acid sequence is given by SEQ ID NO:40), which is a variant alpha 1 subunit according to the present invention, and more specifically, is a splice variant of the known protein CCAG_HUMAN, which is encoded by the CACNA1G gene. This protein is the alpha 1G subunit and results in a voltage-dependent T-type calcium channel. The subunit is also known as alpha subunit Cav3.1.

[0274] T-type calcium channels belong to the “low-voltage activated (LVA)” group and are strongly blocked by mibefradil, as described above. These channels are characterized by voltage-dependent inactivation. T-type channels serve pacemaking functions in both central neurons and cardiac nodal cells and support calcium signaling in secretory cells and vascular smooth muscle, as previously described.

[0275] This alpha subunit is highly expressed in brain, in particular in the amygdala, subthalamic nuclei, cerebellum and thalamus, where it may be involved in neuronal processing. It has moderate but highly localized expression in heart, with low expression in placenta, kidney and lung.

[0276] This alpha subunit has the following structure. Each of the four internal repeats contains five hydrophobic transmembrane segments (S1, S2, S3, S5, S6) and one positively charged transmembrane segment (S4). S4 segments probably represent the voltage-sensor and are characterized by a series of positively charged amino acids at every third position. The linker region between repeat III and IV probably play a role in the inactivation of the channel. The C-terminal part may be implicated in the anchoring of the protein to the membrane.

[0277] In response to an increase in the level of intracellular calcium, the T-type channels are activated by CaM-kinase II.

[0278] The structure of the splice variant according to the present invention features a unique insertion and a skipped exon, as compared to the known protein sequence. An alignment is provided at the end of this section, while the comparison between the two sequences is described below.

[0279] According to preferred embodiments of the present invention, there is provided an isolated chimeric polypeptide encoding for R12947_P13, comprising a first amino acid sequence being at least 90% homologous to (SEQ ID NO: 105) MDEEEDGAGAEESGQPRSFMRLNDLSGAGGRPGPGSAEKDPGSADSEAEGLPYPALAPVVFFYLSQDSRPRSWCLRTVCNPWFERISMLVILLNCVTLGMFRPCEDIACDSQRCRILQAFDDFIFAFFAVEMVVKMVALGIFGKKCYLGDTWNRLDFFIVIAGMLEYSLDLQNVSFSAVRTVRVLRPLRAINRVPSMRILVTLLLDTLPMLGNVLLLCFFVFFIFGIVGVQLWAGLLRNRCFLPENFSLPLSVDLERYYQTENEDESPFICSQPRENGMRSCRSVPTLRGDGGGGPPCGLDYEAYNSSSNTTCVNWNQYYTNCSAGEHNPFKGAINFDNIGYAWIAIFQVITLEGWVDIMYFVMDAHSFYNFIYFILLIIVGSFFMINLCLVVIATQFSETKQRESQLMREQRVRFLSNASTLASFSEPGSCYEELLKYLVYILRKAARRLAQVSRAAGVRVGLLSSPAPLGGQETQPSSSCSRSHRRLSVHHLVHHHHHHHHHYHLGNGTLRAPRASPEIQDRDANGSRRLMLPPPSTPALSGAPPGGAESVHSFYHADCHLEPVRCQAPPPRSPSEASGRTVGSGKVYPTVHTSPPPETLKEKALVEVAASSGPPTLTSLNIPPGPYSSMHKLLETQSTGACQSSCKISSPCLKADSGACGPDSCPYCARAGAGEVELADREMPDSDSEAVYEFTQDAQHSDLRDPHSRRQRSLGPDAEPSSVLAFWRLICDTFRKIVDSKYFGRGIMIAILVNTLSMGIEYHEQPEELTNALEISNIVFTSLFALEMLLKLLVYGPFGYIKNPYNIFDGVIVVISVWEIVGQQGGGLSVLRTFRLMRVLKLVRFLPALQRQLVVLMKTMDNVATFCMLLMLFIFIFSILGMHLFGCKFASERDGDTLPDRKNFDSLLWAIVTVFQILTQEDWNKVLYNGMASTSSWAALYFIALMTFGNYVLFNLLVAILVEGFQAE corresponding to amino acids 1-970 of CCAG_HUMAN, which also corresponds to amino acids 1-970 of R12947_P13, a second amino acid sequence being at least 90% homologous to (SEQ ID NO: 106) GDANKSESEPDFFSPSLDGDGDRKKCLALVSLGEHPELRKSLLPPLIIHTAATPMSLPKSTSTGLGEALGPASRRTSSSGSAEPGAAHEMKSPPSARSSPHSPWSAASSWTSRRSSRNSLGRAPSLKRRSPSGERRSLLSGEGQESQDEEESSEEERASPAGSDHRHRGSLEREAKSSFDLPDTLQVPGLHRTASGRGSASEHQDCNGKSASGRLARALRPDDPPLDGDDADDEGNLSKGERVRAWIRARLPACCLERDSWSAYIFPPQSRFRLLCHRIITHKMFDHVVLVIIFLNCITIAMERPKIDPHSAERIFLTLSNYIFTAVFLAEMTVKVVALGWCFGEQAYLRSSWNVLDGLLVLISVIDILVSMVSDSGTKILGMLRVLRLLRTLRPLRVISRAQGLKLVVETLMSSLKPIGNIVVICCAFFIIFGILGVQLFKGKFFVCQGEDTRNITNKSDCAEASYRWVRHKYNFDNLGQALMSLFVLASKDGWVDIMYDGLDAVGVDQQPIMNHNPWMLLYFISFLLIVAFFVLNMFVGVVVENFHKCRQHQEEEEARRREEKRLRRLEKKRR corresponding to amino acids 994-1568 of CCAG_HUMAN, which also corresponds to amino acids 971-1545 of R12947_P13, a third amino acid sequence being at least 70%, optionally at least 80%, preferably at least 85%, more preferably at least 90% and most preferably at least 95% homologous to a polypeptide having the sequence (SEQ ID NO: 109) SKEKQMAD corresponding to amino acids 1546-1553 of R12947_P13, a fourth amino acid sequence being at least 90% homologous to (SEQ ID NO: 107) LMLDDVIASGSSASAASEAQCKPYYSDYSRFRLLVHHLCTSHYLDLFITGVIGLNVVTMAMEHYQQPQILDEALKICNYIFTVIFVLESVFKLVAFGFRRFFQDRWNQLDLAIVLLSIMGITLEEIEVNASLPINPTIIRIMRVLRIARVLKLLKMAVGMRALLDTVMQALPQVGNLGLLFMLLFFIFAALGVELFGDLECDETHPCEGLGRHATFRNFGMAFLTLFRVSTGDNWNGIMKDTLRDCDQESTCYNTVISPIYFVSFVLTAQFVLVNVVIAVLMKHLEESNKEAKEEAEEAELELEMKTLSPQPHSPLGSPFLWPGVEGPDSPDSPKPGALHPAAHARSASHFSLEHPT corresponding to amino acids 1570-1927 of CCAG_HUMAN, which also corresponds to amino acids 1554-1911 of R12947_P13, and a fifth amino acid sequence being at least 90% homologous to (SEQ ID NO: 108) [sequence omitted] corresponding to amino acids 2021-2377 of CCAG_HUMAN, which also corresponds to amino acids 1912-2268 of R12947_P13, wherein said first amino acid sequence, second amino acid sequence, third amino acid sequence, fourth amino acid sequence and fifth amino acid sequence are contiguous and in a sequential order.

[0280] According to preferred embodiments of the present invention, there is provided an isolated chimeric polypeptide encoding for an edge portion of R 12947_P13, comprising a polypeptide having a length “n”, wherein n is at least about 10 amino acids in length, optionally at least about 20 amino acids in length, preferably at least about 30 amino acids in length, more preferably at least about 40 amino acids in length and most preferably at least about 50 amino acids in length, wherein at least two amino acids comprise EG, having a structure as follows: a sequence starting from any of amino acid numbers 970−x to 971; and ending at any of amino acid numbers 971+((n−2)−x), in which x varies from 0 to n−2.

[0281] According to preferred embodiments of the present invention, there is provided an isolated polypeptide encoding for an edge portion of R12947_P13, comprising an amino acid sequence being at least 70%, optionally at least about 80%, preferably at least about 85%, more preferably at least about 90% and most preferably at least about 95% homologous to the sequence encoding for (SEQ ID NO: 109) SKEKQMAD, corresponding to R12947_P13.

[0282] According to preferred embodiments of the present invention, there is provided an isolated chimeric polypeptide encoding for an edge portion of R12947_P13, comprising a polypeptide having a length “n”, wherein n is at least about 10 amino acids in length, optionally at least about 20 amino acids in length, preferably at least about 30 amino acids in length, more preferably at least about 40 amino acids in length and most preferably at least about 50 amino acids in length, wherein at least two amino acids comprise TM, having a structure as follows: a sequence starting from any of amino acid numbers 1911−x to 1911; and ending at any of amino acid numbers 1912+((n−2)−x), in which x varies from 0 to n−2.

[0283] Domains affected by alternative splicing includes the extracellular loop between S1 and S2 transmembrane domains of domain II; the S2 transmembrane domain of domain II; and the cytoplasmic loop between domain III and domain IV.

[0284] An alternative splice donor site of exon 25, which encodes for the cytoplasmic loop between domain III and domain IV of this alpha subunit type, has been described that leads to skipping of seven amino acid residues, (SEQ ID NO: 110) KAKQMA. The effect on the calcium channel is a rightward shift of activation and inactivation kinetics, and slowing of activation kinetics. In the same channel type, the skipping of exon 26 (which encodes for for the cytoplasmic loop between domain III and domain IV) leads to an 18-amino-acid deletion with a left shift of inactivation kinetics and accelerated activation kinetics.

[0285] From the above description of the effect of changes to the cytoplasmic loop between domain III and domain IV of this variant, it is expected that the variant will have a right shift of activation and inactivation and slowing of activation kinetics or a left shift of inactivation and accelerated activation kinetics.

Sequence name: CCAG_HUMAN

documentation:

of: R12947_P13 (SEQ ID NO: 18)×CCAG_HUMAN (SEQ ID NO: 111) . . .

segment 1/1:

[0286] Quality: 21913.00

Escore: 0

Matching length: 2261 Total

length: 2384

Matching Percent Similarity: 100.00 Matching Percent

Identity: 99.96

Total Percent Similarity: 94.84 Total Percent

Identity: 94.80

[0287] Gaps: 3

| | . . . . . | |
|---|---|---|
| 1 | MDEEEDGAGAEESGQPRSFMRLNDLSGAGGRPGPGSAEKDPGSADSEAEG | 50 |
| | \|\|\|\|\|\|\|\|\|\|\|\|\|\|\|\|\|\|\|\|\|\|\|\|\|\|\|\|\|\|\|\|\|\|\|\|\|\|\|\|\|\|\|\|\|\|\|\|\|\| | |
| 1 | MDEEEDGAGAEESGQPRSFMRLNDLSGAGGRPGPGSAEKDPGSADSEAEG | 50 |
| | . . . . . | |
| 51 | LPYPALAPVVFFYLSQDSRPRSWCLRTVCNPWFERISMLVILLNCVTLGM | 100 |
| | \|\|\|\|\|\|\|\|\|\|\|\|\|\|\|\|\|\|\|\|\|\|\|\|\|\|\|\|\|\|\|\|\|\|\|\|\|\|\|\|\|\|\|\|\|\|\|\|\|\| | |
| 51 | LPYPALAPVVFFYLSQDSRPRSWCLRTVCNPWFERISMLVILLNCVTLGM | 100 |
| | . . . . . | |
| 101 | FRPCEDIACDSQRCRILQAFDDFIFAFFAVEMVVKMVALGIFGKKCYLGD | 150 |
| | \|\|\|\|\|\|\|\|\|\|\|\|\|\|\|\|\|\|\|\|\|\|\|\|\|\|\|\|\|\|\|\|\|\|\|\|\|\|\|\|\|\|\|\|\|\|\|\|\|\| | |
| 101 | FRPCEDIACDSQRCRILQAFDDFIFAFFAVEMVVKMVALGIFGKKCYLGD | 150 |
| | . . . . . | |
| 151 | TWNRLDFFIVIAGMLEYSLDLQNVSFSAVRTVRVLRPLRAINRVPSMRIL | 200 |
| | \|\|\|\|\|\|\|\|\|\|\|\|\|\|\|\|\|\|\|\|\|\|\|\|\|\|\|\|\|\|\|\|\|\|\|\|\|\|\|\|\|\|\|\|\|\|\|\|\|\| | |
| 151 | TWNRLDFFIVIAGMLEYSLDLQNVSFSAVRTVRVLRPLRAINRVPSMRIL | 200 |
| | . . . . . | |
| 201 | VTLLLDTLPMLGNVLLLCFFVFFIFGIVGVQLWAGLLRNRCFLPENFSLP | 250 |
| | \|\|\|\|\|\|\|\|\|\|\|\|\|\|\|\|\|\|\|\|\|\|\|\|\|\|\|\|\|\|\|\|\|\|\|\|\|\|\|\|\|\|\|\|\|\|\|\|\|\| | |
| 201 | VTLLLDTLPMLGNVLLLCFFVFFIFGIVGVQLWAGLLRNRCFLPENFSLP | 250 |
| | . . . . . | |
| 251 | LSVDLERYYQTENEDESPFICSQPRENGMRSCRSVPTLRGDGGGGPPCGL | 300 |
| | \|\|\|\|\|\|\|\|\|\|\|\|\|\|\|\|\|\|\|\|\|\|\|\|\|\|\|\|\|\|\|\|\|\|\|\|\|\|\|\|\|\|\|\|\|\|\|\|\|\| | |
| 251 | LSVDLERYYQTENEDESPFICSQPRENGMRSCRSVPTLRGDGGGGPPCGL | 300 |
| | . . . . . | |
| 301 | DYEAYNSSSNTTCVNMNQYYTNCSAGEHNPFKGAINFDNIGYAWIAIFQV | 350 |
| | \|\|\|\|\|\|\|\|\|\|\|\|\|\|\|\|\|\|\|\|\|\|\|\|\|\|\|\|\|\|\|\|\|\|\|\|\|\|\|\|\|\|\|\|\|\|\|\|\|\| | |
| 301 | DYEAYNSSSNTTCVNMNQYYTNCSAGEHNPFKGAINFDNIGYAWIAIFQV | 350 |
| | . . . . . | |
| 351 | ITLEGWVDIMYFVMDAHSFYNFIYFILLIIVGSFFMINLCLVVIATQFSE | 400 |
| | \|\|\|\|\|\|\|\|\|\|\|\|\|\|\|\|\|\|\|\|\|\|\|\|\|\|\|\|\|\|\|\|\|\|\|\|\|\|\|\|\|\|\|\|\|\|\|\|\|\| | |
| 351 | ITLEGWVDIMYFVMDAHSFYNFIYFILLIIVGSFFMINLCLVVIATQFSE | 400 |
| | . . . . . | |
| 401 | TKQRESQLMREQRVRFLSNASTLASFSEPGSCYEELLKYLVYILRKAARR | 450 |
| | \|\|\|\|\|\|\|\|\|\|\|\|\|\|\|\|\|\|\|\|\|\|\|\|\|\|\|\|\|\|\|\|\|\|\|\|\|\|\|\|\|\|\|\|\|\|\|\|\|\| | |
| 401 | TKQRESQLMREQRVRFLSNASTLASFSEPGSCYEELLKYLVYILRKAARR | 450 |
| | . . . . . | |
| 451 | LAQVSRAAGVRVGLLSSPAPLGGQETQPSSSCSRSHRRLSVHHLVHHHHH | 500 |
| | \|\|\|\|\|\|\|\|\|\|\|\|\|\|\|\|\|\|\|\|\|\|\|\|\|\|\|\|\|\|\|\|\|\|\|\|\|\|\|\|\|\|\|\|\|\|\|\|\|\| | |
| 451 | LAQVSRAAGVRVGLLSSPAPLGGQETQPSSSCSRSHRRLSVHHLVHHHHH | 500 |
| | . . . . . | |
| 501 | HHHHYHLGNGTLRAPRASPEIQDRDANGSRRLMLPPPSTPALSGAPPGGA | 550 |
| | \|\|\|\|\|\|\|\|\|\|\|\|\|\|\|\|\|\|\|\|\|\|\|\|\|\|\|\|\|\|\|\|\|\|\|\|\|\|\|\|\|\|\|\|\|\|\|\|\|\| | |
| 501 | HHHHYHLGNGTLRAPRASPEIQDRDANGSRRLMLPPPSTPALSGAPPGGA | 550 |
| | . . . . . | |
| 551 | ESVHSFYHADCHLEPVRCQAPPPRSPSEASGRTVGSGKVYPTVHTSPPPE | 600 |
| | \|\|\|\|\|\|\|\|\|\|\|\|\|\|\|\|\|\|\|\|\|\|\|\|\|\|\|\|\|\|\|\|\|\|\|\|\|\|\|\|\|\|\|\|\|\|\|\|\|\| | |
| 551 | ESVHSFYHADCHLEPVRCQAPPPRSPSEASGRTVGSGKVYPTVHTSPPPE | 600 |
| | . . . . . | |
| 601 | TLKEKALVEVAASSGPPTLTSLNIPPGPYSSMHKLLETQSTGACQSSCKI | 650 |
| | \|\|\|\|\|\|\|\|\|\|\|\|\|\|\|\|\|\|\|\|\|\|\|\|\|\|\|\|\|\|\|\|\|\|\|\|\|\|\|\|\|\|\|\|\|\|\|\|\|\| | |
| 601 | TLKEKALVEVAASSGPPTLTSLNIPPGPYSSMHKLLETQSTGACQSSCKI | 650 |
| | . . . . . | |
| 651 | SSPCLKADSGACGPDSCPYCARAGAGEVELADREMPDSDSEAVYEFTQDA | 700 |
| | \|\|\|\|\|\|\|\|\|\|\|\|\|\|\|\|\|\|\|\|\|\|\|\|\|\|\|\|\|\|\|\|\|\|\|\|\|\|\|\|\|\|\|\|\|\|\|\|\|\| | |
| 651 | SSPCLKADSGACGPDSCPYCARAGAGEVELADREMPDSDSEAVYEFTQDA | 700 |
| | . . . . . | |
| 701 | QHSDLRDPHSRRQRSLGPDAEPSSVLAFWRLICDTFRKIVDSKYFGRGIM | 750 |
| | \|\|\|\|\|\|\|\|\|\|\|\|\|\|\|\|\|\|\|\|\|\|\|\|\|\|\|\|\|\|\|\|\|\|\|\|\|\|\|\|\|\|\|\|\|\|\|\|\|\| | |
| 701 | QHSDLRDPHSRRQRSLGPDAEPSSVLAFWRLICDTFRKIVDSKYFGRGIM | 750 |
| | . . . . . | |
| 751 | IAILVNTLSMGIEYHEQPEELTNALEISNIVFTSLFALEMLLKLLVYGPF | 800 |
| | \|\|\|\|\|\|\|\|\|\|\|\|\|\|\|\|\|\|\|\|\|\|\|\|\|\|\|\|\|\|\|\|\|\|\|\|\|\|\|\|\|\|\|\|\|\|\|\|\|\| | |
| 751 | IAILVNTLSMGIEYHEQPEELTNALEISNIVFTSLFALEMLLKLLVYGPF | 800 |
| | . . . . . | |
| 801 | GYIKNPYNIFDGVIVVISVWEIVGQQGGGLSVLRTFRLMRVLKLVRFLPA | 850 |
| | \|\|\|\|\|\|\|\|\|\|\|\|\|\|\|\|\|\|\|\|\|\|\|\|\|\|\|\|\|\|\|\|\|\|\|\|\|\|\|\|\|\|\|\|\|\|\|\|\|\| | |
| 801 | GYIKNPYNIFDGVIVVISVWEIVGQQGGGLSVLRTFRLMRVLKLVRFLPA | 850 |
| | . . . . . | |
| 851 | LQRQLVVLMKTMDNVATFCMLLMLFIFIFSILGMHLFGCKFASERDGDTL | 900 |
| | \|\|\|\|\|\|\|\|\|\|\|\|\|\|\|\|\|\|\|\|\|\|\|\|\|\|\|\|\|\|\|\|\|\|\|\|\|\|\|\|\|\|\|\|\|\|\|\|\|\| | |
| 851 | LQRQLVVLMKTMDNVATFCMLLMLFIFIFSILGMHLFGCKFASERDGDTL | 900 |
| | . . . . . | |
| 901 | PDRKNFDSLLQAIVTVFQILTQEDWNKVLYNGMASTSSWAALYFIALMTF | 950 |
| | \|\|\|\|\|\|\|\|\|\|\|\|\|\|\|\|\|\|\|\|\|\|\|\|\|\|\|\|\|\|\|\|\|\|\|\|\|\|\|\|\|\|\|\|\|\|\|\|\|\| | |
| 901 | PDRKNFDSLLQAIVTVFQILTQEDWNKVLYNGMASTSSWAALYFIALMTF | 950 |
| | . . . . . | |
| 951 | GNYVLFNLLVAILVEGFQAE.......................GDANKSE | 977 |
| | \|\|\|\|\|\|\|\|\|\|\|\|\|\|\|\|\|\|\|\| \|\|\|\|\|\|\| | |
| 951 | GNYVLFNLLVAILVEGFQAEEISKREDASGQLSCIQLPVDSQGGDANKSE | 1000 |
| | . . . . . | |
| 978 | SEPDFFSPSLDGDGDRKKCLALVSLGEHPELRKSLLPPLIIHTAATPMSL | 1027 |
| | \|\|\|\|\|\|\|\|\|\|\|\|\|\|\|\|\|\|\|\|\|\|\|\|\|\|\|\|\|\|\|\|\|\|\|\|\|\|\|\|\|\|\|\|\|\|\|\|\|\| | |
| 1001 | SEPDFFSPSLDGDGDRKKCLALVSLGEHPELRKSLLPPLIIHTAATPMSL | 1050 |
| | . . . . . | |
| 1028 | PKSTSTGLGEALGPASRRTSSSGSAEPGAAHEMKSPPSARSSPHSPWSAA | 1077 |
| | \|\|\|\|\|\|\|\|\|\|\|\|\|\|\|\|\|\|\|\|\|\|\|\|\|\|\|\|\|\|\|\|\|\|\|\|\|\|\|\|\|\|\|\|\|\|\|\|\|\| | |
| 1051 | PKSTSTGLGEALGPASRRTSSSGSAEPGAAHEMKSPPSARSSPHSPWSAA | 1100 |
| | . . . . . | |
| 1078 | SSWTSRRSSRNSLGRAPSLKRRSPSGERRSLLSGEGQESQDEEESSEEER | 1127 |
| | \|\|\|\|\|\|\|\|\|\|\|\|\|\|\|\|\|\|\|\|\|\|\|\|\|\|\|\|\|\|\|\|\|\|\|\|\|\|\|\|\|\|\|\|\|\|\|\|\|\| | |
| 1101 | SSWTSRRSSRNSLGRAPSLKRRSPSGERRSLLSGEGQESQDEEESSEEER | 1150 |
| | . . . . . | |
| 1128 | ASPAGSDHRHRGSLEREAKSSFDLPDTLQVPGLHRTASGRGSASEHQDCN | 1177 |
| | \|\|\|\|\|\|\|\|\|\|\|\|\|\|\|\|\|\|\|\|\|\|\|\|\|\|\|\|\|\|\|\|\|\|\|\|\|\|\|\|\|\|\|\|\|\|\|\|\|\| | |
| 1151 | ASPAGSDHRHRGSLEREAKSSFDLPDTLQVPGLHRTASGRGSASEHQDCN | 1200 |
| | . . . . . | |
| 1178 | GKSASGRLARALRPDDPPLDGDDADDEGNLSKGERVRAWIRARLPACCLE | 1227 |
| | \|\|\|\|\|\|\|\|\|\|\|\|\|\|\|\|\|\|\|\|\|\|\|\|\|\|\|\|\|\|\|\|\|\|\|\|\|\|\|\|\|\|\|\|\|\|\|\|\|\| | |
| 1201 | GKSASGRLARALRPDDPPLDGDDADDEGNLSKGERVRAWIRARLPACCLE | 1250 |
| | . . . . . | |
| 1228 | RDSWSAYIFPPQSRFRLLCHRIITHKMFDHVVLVIIFLNCITIAMERPKI | 1277 |
| | \|\|\|\|\|\|\|\|\|\|\|\|\|\|\|\|\|\|\|\|\|\|\|\|\|\|\|\|\|\|\|\|\|\|\|\|\|\|\|\|\|\|\|\|\|\|\|\|\|\| | |
| 1251 | RDSWSAYIFPPQSRFRLLCHRIITHKMFDHVVLVIIFLNCITIAMERPKI | 1300 |
| | . . . . . | |
| 1278 | DPHSAERIFLTLSNYIFTAVFLAEMTVKVVALGWCFGEQAYLRSSWNVLD | 1327 |
| | \|\|\|\|\|\|\|\|\|\|\|\|\|\|\|\|\|\|\|\|\|\|\|\|\|\|\|\|\|\|\|\|\|\|\|\|\|\|\|\|\|\|\|\|\|\|\|\|\|\| | |
| 1301 | DPHSAERIFLTLSNYIFTAVFLAEMTVKVVALGWCFGEQAYLRSSWNVLD | 1350 |
| | . . . . . | |
| 1328 | GLLVLISVIDILVSMVSDSGTKILGMLRVLRLLRTLRPLRVISRAQGLKL | 1377 |
| | \|\|\|\|\|\|\|\|\|\|\|\|\|\|\|\|\|\|\|\|\|\|\|\|\|\|\|\|\|\|\|\|\|\|\|\|\|\|\|\|\|\|\|\|\|\|\|\|\|\| | |
| 1351 | GLLVLISVIDILVSMVSDSGTKILGMLRVLRLLRTLRPLRVISRAQGLKL | 1400 |
| | . . . . . | |
| 1378 | VVETLMSSLKPIGNIVVICCAFFIIFGILGVQLFKGKFFVCQGEDTRNIT | 1427 |
| | \|\|\|\|\|\|\|\|\|\|\|\|\|\|\|\|\|\|\|\|\|\|\|\|\|\|\|\|\|\|\|\|\|\|\|\|\|\|\|\|\|\|\|\|\|\|\|\|\|\| | |
| 1401 | VVETLMSSLKPIGNIVVICCAFFIIFGILGVQLFKGKFFVCQGEDTRNIT | 1450 |
| | . . . . . | |
| 1428 | NKSDCAEASYRWVRHKYNFDNLGQALMSLFVLASKDGWVDLMYDGLDAVG | 1477 |
| | \|\|\|\|\|\|\|\|\|\|\|\|\|\|\|\|\|\|\|\|\|\|\|\|\|\|\|\|\|\|\|\|\|\|\|\|\|\|\|\|\|\|\|\|\|\|\|\|\|\| | |
| 1451 | NKSDCAEASYRWVRHKYNFDNLGQALMSLFVLASKDGWVDIMYDGLDAVG | 1500 |
| | . . . . . | |
| 1478 | VDQQPIMNHNPWMLLYFISFLLIVAFFVLNMFVGVVVENFHKCRQHQEEE | 1527 |
| | \|\|\|\|\|\|\|\|\|\|\|\|\|\|\|\|\|\|\|\|\|\|\|\|\|\|\|\|\|\|\|\|\|\|\|\|\|\|\|\|\|\|\|\|\|\|\|\|\|\| | |
| 1501 | VDQQPIMNHNPWMLLYFISFLLIVAFFVLNMFVGVVVENFHKCRQHQEEE | 1550 |
| | . . . . . | |
| 1528 | EARRREEKRLRRLEKKRRSKEKQMADLMLDDVIASGSSASAASEAQCKPY | 1577 |
| | \|\|\|\|\|\|\|\|\|\|\|\|\|\|\|\|\|\| :\|\|\|\|\|\|\|\|\|\|\|\|\|\|\|\|\|\|\|\|\|\|\|\| | |
| 1551 | EARRREEKRLRRLEKKRR.......NLMLDDVIASGSSASAASEAQCKPY | 1593 |
| | . . . . . | |
| 1578 | YSDYSRFRLLVHHLCTSHYLDLFITGVIGLNVVTMAMEHYQQPQILDEAL | 1627 |
| | \|\|\|\|\|\|\|\|\|\|\|\|\|\|\|\|\|\|\|\|\|\|\|\|\|\|\|\|\|\|\|\|\|\|\|\|\|\|\|\|\|\|\|\|\|\|\|\|\|\| | |
| 1594 | YSDYSRFRLLVHHLCTSHYLDLFITGVIGLNVVTMAMEHYQQPQILDEAL | 1643 |
| | . . . . . | |
| 1628 | KICNYIFTVIFVLESVFKLVAFGFRRFFQDRWNQLDLAIVLLSIMGITLE | 1677 |
| | \|\|\|\|\|\|\|\|\|\|\|\|\|\|\|\|\|\|\|\|\|\|\|\|\|\|\|\|\|\|\|\|\|\|\|\|\|\|\|\|\|\|\|\|\|\|\|\|\|\| | |
| 1644 | KICNYIFTVIFVLESVFKLVAFGFRRFFQDRWNQLDLAIVLLSIMGITLE | 1693 |
| | . . . . . | |
| 1678 | EIEVNASLPINPTIIRIMRVLRIARVLKLLKMAVGMRALLDTVMQALPQV | 1727 |
| | \|\|\|\|\|\|\|\|\|\|\|\|\|\|\|\|\|\|\|\|\|\|\|\|\|\|\|\|\|\|\|\|\|\|\|\|\|\|\|\|\|\|\|\|\|\|\|\|\|\| | |
| 1694 | EIEVNASLPINPTIIRIMRVLRIARVLKLLKMAVGMRALLDTVMQALPQV | 1743 |
| | . . . . . | |
| 1728 | GNLGLLGMLLFFIFAALGVELFGDLECDETHPCEGLGRHATFRNFGMAFL | 1777 |
| | \|\|\|\|\|\|\|\|\|\|\|\|\|\|\|\|\|\|\|\|\|\|\|\|\|\|\|\|\|\|\|\|\|\|\|\|\|\|\|\|\|\|\|\|\|\|\|\|\|\| | |
| 1744 | GNLGLLGMLLFFIFAALGVELFGDLECDETHPCEGLGRHATFRNFGMAFL | 1793 |
| | . . . . . | |
| 1778 | TLFRVSTGDNWNGIMKDTLRDCDQESTCYNTVISPIYFVSFVLTAQFVLV | 1827 |
| | \|\|\|\|\|\|\|\|\|\|\|\|\|\|\|\|\|\|\|\|\|\|\|\|\|\|\|\|\|\|\|\|\|\|\|\|\|\|\|\|\|\|\|\|\|\|\|\|\|\| | |
| 1794 | TLFRVSTGDNWNGIMKDTLRDCDQESTCYNTVISPIYFVSFVLTAQFVLV | 1843 |
| | . . . . . | |
| 1828 | NVVIAVLMKHLEESNKEAKEEAELEAELELEMKTLSPQPHSPLGSPFLWP | 1877 |
| | \|\|\|\|\|\|\|\|\|\|\|\|\|\|\|\|\|\|\|\|\|\|\|\|\|\|\|\|\|\|\|\|\|\|\|\|\|\|\|\|\|\|\|\|\|\|\|\|\|\| | |
| 1844 | NVVIAVLMKHLEESNKEAKEEAELEAELELEMKTLSPQPHSPLGSPFLWP | 1893 |
| | . . . . . | |
| 1878 | GVEGPDSPDSPKPGALHPAAHARSASHFSLEHPT................ | 1911 |
| | \|\|\|\|\|\|\|\|\|\|\|\|\|\|\|\|\|\|\|\|\|\|\|\|\|\|\|\|\|\|\|\|\|\| | |
| 1894 | GVEGPDSPDSPKPGALHPAAHARSASHFSLEHPTDRQLFDTISLLIQGSL | 1943 |
| | . . . . . | |
| 1911 | .................................................. | 1911 |
| 1944 | EWELKLMDELAGPGGQPSAFPSAPSLGGSDPQIPLAEMEALSLTSEIVSE | 1993 |
| | . . . . . | |
| 1912 | ...........................MQPHPTELPGPDLLTVRKSGVSR | 1934 |
| | \|\|\|\|\|\|\|\|\|\|\|\|\|\|\|\|\|\|\|\|\|\|\| | |
| 1994 | PSCSLALTDDSLPDDMHTLLLSALESNMQPHPTELPGPDLLTVRKSGVSR | 2043 |
| | . . . . . | |
| 1935 | THSLPNDSYMCRHGSTAEGPLGHRGWGLPKAQSGSVLSVHSQPADTSYIL | 1984 |
| | \|\|\|\|\|\|\|\|\|\|\|\|\|\|\|\|\|\|\|\|\|\|\|\|\|\|\|\|\|\|\|\|\|\|\|\|\|\|\|\|\|\|\|\|\|\|\|\|\|\| | |
| 2044 | THSLPNDSYMCRHGSTAEGPLGHRGWGLPKAQSGSVLSVHSQPADTSYIL | 2093 |
| | . . . . . | |
| 1985 | QLPKDAPHLLQPHSAPTWGTIPKLPPPGRSPLAQRPLRRQAAIRTDSLDV | 2034 |
| | \|\|\|\|\|\|\|\|\|\|\|\|\|\|\|\|\|\|\|\|\|\|\|\|\|\|\|\|\|\|\|\|\|\|\|\|\|\|\|\|\|\|\|\|\|\|\|\|\|\| | |
| 2094 | QLPKDAPHLLQPHSAPTWGTIPKLPPPGRSPLAQRPLRRQAAIRTDSLDV | 2143 |
| | . . . . . | |
| 2035 | QGLGSREDLLAEVSGPSPPLARAYSFWGQSSTQAQQHSRSHSKISKMMTP | 2084 |
| | \|\|\|\|\|\|\|\|\|\|\|\|\|\|\|\|\|\|\|\|\|\|\|\|\|\|\|\|\|\|\|\|\|\|\|\|\|\|\|\|\|\|\|\|\|\|\|\|\|\| | |
| 2144 | QGLGSREDLLAEVSGPSPPLARAYSFWGQSSTQAQQHSRSHSKISKHMTP | 2193 |
| | . . . . . | |
| 2085 | PAPCPGPEPNWGKGPPETRSSLELDTELSWISGDLLPPGGQEEPPSPRDL | 2134 |
| | \|\|\|\|\|\|\|\|\|\|\|\|\|\|\|\|\|\|\|\|\|\|\|\|\|\|\|\|\|\|\|\|\|\|\|\|\|\|\|\|\|\|\|\|\|\|\|\|\|\| | |
| 2194 | PAPCPGPEPNWGKGPPETRSSLELDTELSWISGDLLPPGGQEEPPSPRDL | 2243 |
| | . . . . . | |
| 2135 | KKCYSVEAQSCQRRPTSWLDEQRRHSIAVSCLDSGSQPHLGTDPSNLGGQ | 2184 |
| | \|\|\|\|\|\|\|\|\|\|\|\|\|\|\|\|\|\|\|\|\|\|\|\|\|\|\|\|\|\|\|\|\|\|\|\|\|\|\|\|\|\|\|\|\|\|\|\|\|\| | |
| 2244 | KKCYSVEAQSCQRRPTSWLDEQRRHSIAVSCLDSGSQPHLGTDPSNLGGQ | 2293 |
| | . . . . . | |
| 2185 | PLGGPGSRPKKKLSPPSITIDPPESQGPRTPPSPGICLRRRAPSSDSKDP | 2234 |
| | \|\|\|\|\|\|\|\|\|\|\|\|\|\|\|\|\|\|\|\|\|\|\|\|\|\|\|\|\|\|\|\|\|\|\|\|\|\|\|\|\|\|\|\|\|\|\|\|\|\| | |
| 2294 | PLGGPGSRPKKKLSPPSITIDPPESQGPRTPPSPGICLRRRAPSSDSKDP | 2343 |
| | . . . | |
| 2235 | LASGPPDSMAASPSPKKDVLSLSGLSSDPADLDP | 2268 |
| | \|\|\|\|\|\|\|\|\|\|\|\|\|\|\|\|\|\|\|\|\|\|\|\|\|\|\|\|\|\|\|\|\|\| | |
| 2344 | LASGPPDSMAASPSPKKDVLSLSGLSSDPADLDP | 2377 |

### EXAMPLE 10

[0288] This Example relates to the variant R12947_P14 (SEQ ID NO:19; the nucleic acid sequence is given by SEQ ID NO:41), which is a variant alpha 1 subunit according to the present invention, and more specifically, is a splice variant of the known protein CCAG_HUMAN, which is encoded by the CACNA1G gene. This protein is the alpha 1G subunit and results in a voltage-dependent T-type calcium channel. The subunit is also known as alpha subunit Cav3.1 and is described in greater detail with regard to Example 9.

[0289] The structure of the splice variant according to the present invention features a a skipped exon and a unique tail, as compared to the known protein sequence. An alignment is provided at the end of this section, while the comparison between the two sequences is described below.

[0290] According to preferred embodiments of the present invention, there is provided an isolated chimeric polypeptide encoding for R12947_P14, comprising a first amino acid sequence being at least 90% homologous to (SEQ ID NO: 112) MDEEEDGAGAEESGQPRSFMRLNDLSGAGGRPGPGSAEKDPGSADSEAEGLPYPALAPVVFFYLSQDSRPRSWCLRTVCNPWFERISMLVILLNCVTLGMFRPCEDIACDSQRCRILQAFDDFIFAFFAVEMVVKMVALGIFGKKCYLGDTWNRLDFFIVIAGMLEYSLDLQNVSFSAVRTVRVLRPLRAINRVPSMRILVTLLLDTLPMLGNVLLLCFFVFFIFGIVGVQLWAGLLRNRCFLPENFSLPLSVDLERYYQTENEDESPFICSQPRENGMRSCRSVPTLRGDGGGGPPCGLDYEAYNSSSNTTCVNWNQYYTNCSAGEHNPFKGAINFDNIGYAWIAIFQVITLEGWVDIMYFVMDAHSFYNFIYFILLIIVGSFFMINLCLVVIATQFSETKQRESQLMREQRVRFLSNASTLASFSEPGSCYEELLKYLVYILRKAARRLAQVSRAAGVRVGLLSSPAPLGGQETQPSSSCSRSHRRLSVHHLVHHHHHHHHHYHLGNGTLRAPRASPEIQDRDANGSRRLMLPPPSTPALSGAPPGGAESVHSFYHADCHLEPVRCQAPPPRSPSEASGRTVGSGKVYPTVHTSPPPETLKEKALVEVAASSGPPTLTSLNIPPGPYSSMHKLLETQSTGACQSSCKISSPCLKADSGACGPDSCPYCARAGAGEVELADREMPDSDSEAVYEFTQDAQHSDLRDPHSRRQRSLGPDAEPSSVLAFWRLICDTFRKIVDSKYFGRGIMIAILVNTLSMGIEYHEQPEELTNALEISNIVFTSLFALEMLLKLLVYGPFGYIKNPYNIFDGVIVVISVWEIVGQQGGGLSVLRTFRLMRVLKLVRFLPALQRQLVVLMKTMDNVATFCMLLMLFIFIFSILGMHLFGCKFASERDGDTLPDRKNFDSLLWAIVTVFQILTQEDWNKVLYNGMASTSSWAALYFIALMTFGNYVLFNLLVAILVEGFQAE corresponding to amino acids 1-970 of CCAG_HUMAN, which also corresponds to amino acids 1-970 of R12947_P14, a second amino acid sequence being at least 90% homologous to (SEQ ID NO: 113) GDANKSESEPDFFSPSLDGDGDRKKCLALVSLGEHPELRKSLLPPLIIHTAATPMSLPKSTSTGLGEALGPASRRTSSSGSAEPGAAHEMKSPPSARSSPHSPWSAASSWTSRRSSRNSLGRAPSLKRRSPSGERRSLLSGEGQESQDEEESSEEERASPAGSDHRHRGSLEREAKSSFDLPDTLQVPGLHRTASGRGSASEHQDCNGKSASGRLARALRPDDPPLDGDDADDEGNLSKGERVRAWIRARLPACCLERDSWSAYIFPPQSRFRLLCHRIITHKMFDHVVLVIIFLNCITIAMERPKIDPHSAERIFLTLSNYIFTAVFLAEMTVKVVALGWCFGEQAYLRSSWNVLDGLLVLISVIDILVSMVSDSGTKILGMLRVLRLLRTLRPLRVISRAQGLKLVVETLMSSLKPIGNIVVICCAFFIIFGILGVQLFKGKFFVCQGEDTRNITNKSDCAEASYRWVRHKYNFDNLGQALMSLFVLASKDGWVDIMYDGLDAVGVDQQ corresponding to amino acids 994-1504 of CCAG_HUMAN, which also corresponds to amino acids 971-1481 of R12947_P14, and a third amino acid sequence being at least 70%, optionally at least 80%, preferably at least 85%, more preferably at least 90% and most preferably at least 95% homologous to a polypeptide having the sequence (SEQ ID NO: 114) VGLRWAGSICGLRSLSMGCFQDRKSKAGCKMP corresponding to amino acids 1482-1513 of R12947_P14, wherein said first amino acid sequence, second amino acid sequence and third amino acid sequence are contiguous and in a sequential order.

[0291] According to preferred embodiments of the present invention, there is provided an isolated chimeric polypeptide encoding for an edge portion of R12947_P14, comprising a polypeptide having a length “n”, wherein n is at least about 10 amino acids in length, optionally at least about 20 amino acids in length, preferably at least about 30 amino acids in length, more preferably at least about 40 amino acids in length and most preferably at least about 50 amino acids in length, wherein at least two amino acids comprise EG, having a structure as follows: a sequence starting from any of amino acid numbers 970−x to 970; and ending at any of amino acid numbers 971+((n−2)−x), in which x varies from 0 to n−2.

[0292] According to preferred embodiments of the present invention, there is provided an isolated polypeptide encoding for a tail of R12947_P14, comprising a polypeptide being at least 70%, optionally at least about 80%, preferably at least about 85%, more preferably at least about 90% and most preferably at least about 95% homologous to the sequence (SEQ ID NO: 115) VGLRWAGSICGLRSLSMGCFQDRKSKAGCKMP in R12947_P14.

[0293] Domains affected by alternative splicing include the extracellular loop between S1 and S2 transmembrane domains of domain II; the S2 transmembrane domain of domain II; the pore loop region between S5 and S6 transmembrane domains of domain III; the S6 transmembrane domain of domain III; the cytoplasmic loop between domain III and domain IV; the S1 ransmembrane domain of domain IV; the extracellular loop between S1 and S2 transmembrane domains of domain IV; the S2 transmembrane domain of domain IV; the extracellular loop between S2 and S3 transmembrane domains of domain IV; the S3 transmembrane domain of domain IV; the extracellular loop between S3 and S4 transmembrane domains of domain IV; the S4 transmembrane domain of domain IV; the extracellular loop between S4 and S5 transmembrane domains of domain IV; the S5 transmembrane domain of domain IV; the pore loop region between S5 and S6 transmembrane domains of domain IV; the S6 transmembrane domain of domain IV; and the cytoplasmic C-terminus region of the protein.

[0294] Alternatively spliced C-termini in T-type channels have been described for Cav3.3. They are produced by combinations of alternative splice acceptor sites in exons 33 and 34 which shorten these exons to different lengths. One of the variants produces a frame shift leading to a premature truncation of the C-terminus; however, interestingly it is not the truncation of the C-terminus which seems to cause the functional effects, but rather the presence of the shortened exon 33 in the transcript. These functional effects include slowed activation, accelerated inactivation, and slowed recovery from inactivation. These changes to calcium current kinetics may be expected to influence neuronal function in such a manner that the slowly inactivating variants would be liable to sustain firing patterns. Analogous splice variants are present in T-type Cav3.1-encoding genes affecting exons 34, 35 and 38 but their functional effect is not known; however, it may be assumed to be similar.

[0295] With regard to the effect on the cytoplasmic loop between domain III and domain IV, an explanation is provided with regard to Example 9 above.

[0296] From the above description of the effect of changes to the C-terminus domain of this variant, it is expected that the variant will influence neuronal function in such a manner that the slowly inactivating variants would be liable to sustain firing patterns.

[0297] From the above description of the effect of changes to the cytoplasmic loop between domain III and domain IV of this variant, it is expected that the variant will have a right shift of activation and inactivation and slowing of activation kinetics or a left shift of inactivation and accelerated activation kinetics.

Sequence name: CCAG_HUMAN

documentation:

of: R12947_P14 (residues 1-1481 of SEQ ID NO: 19)×CCAG_HUMAN (SEQ ID NO: 116) . . .

segment 1/1:

[0298] Quality: 14413.00

Escore: 0

Matching length: 1481 Total

length: 1504

Matching Percent Similarity: 100.00 Matching Percent

Identity: 100.00

Total Percent Similaritya: 98.47 Total Percent

Identity: 98.47

[0299] Gaps: 1

| | . . . . . | |
|---|---|---|
| 1 | MDEEEDGAGAEESGQPRSFMRLNDLSGAGGRPGPGSAEKDPGSADSEAEG | 50 |
| | \|\|\|\|\|\|\|\|\|\|\|\|\|\|\|\|\|\|\|\|\|\|\|\|\|\|\|\|\|\|\|\|\|\|\|\|\|\|\|\|\|\|\|\|\|\|\|\|\|\| | |
| 1 | MDEEEDGAGAEESGQPRSFMRLNDLSGAGGRPGPGSAEKDPGSADSEAEG | 50 |
| | . . . . . | |
| 51 | LPYPALAPVVFFYLSQDSRPRSWCLRTVCNPWFERISMLVILLNCVTLGM | 100 |
| | \|\|\|\|\|\|\|\|\|\|\|\|\|\|\|\|\|\|\|\|\|\|\|\|\|\|\|\|\|\|\|\|\|\|\|\|\|\|\|\|\|\|\|\|\|\|\|\|\|\| | |
| 51 | LPYPALAPVVFFYLSQDSRPRSWCLRTVCNPWFERISMLVILLNCVTLGM | 100 |
| | . . . . . | |
| 101 | FRPCEDIACDSQRCRILQAFDDFIFAFFAVEMVVKMVALGIFGKKCYLGD | 150 |
| | \|\|\|\|\|\|\|\|\|\|\|\|\|\|\|\|\|\|\|\|\|\|\|\|\|\|\|\|\|\|\|\|\|\|\|\|\|\|\|\|\|\|\|\|\|\|\|\|\|\| | |
| 101 | FRPCEDIACDSQRCRILQAFDDFIFAFFAVEMVVKMVALGIFGKKCYLGD | 150 |
| | . . . . . | |
| 151 | TWNRLDFFIVIAGMLEYSLDLQNVSFSAVRTVRVLRPLRAINRVPSMRIL | 200 |
| | \|\|\|\|\|\|\|\|\|\|\|\|\|\|\|\|\|\|\|\|\|\|\|\|\|\|\|\|\|\|\|\|\|\|\|\|\|\|\|\|\|\|\|\|\|\|\|\|\|\| | |
| 151 | TWNRLDFFIVIAGMLEYSLDLQNVSFSAVRTVRVLRPLRAINRVPSMRIL | 200 |
| | . . . . . | |
| 201 | VTLLLDTLPMLGNVLLLCFFVFFIFGIVGVQLWAGLLRNRCFLPENFSLP | 250 |
| | \|\|\|\|\|\|\|\|\|\|\|\|\|\|\|\|\|\|\|\|\|\|\|\|\|\|\|\|\|\|\|\|\|\|\|\|\|\|\|\|\|\|\|\|\|\|\|\|\|\| | |
| 201 | VTLLLDTLPMLGNVLLLCFFVFFIFGIVGVQLWAGLLRNRCFLPENFSLP | 250 |
| | . . . . . | |
| 251 | LSVDLERYYQTENEDESPFICSQPRENGMRSCRSVPTLRGDGGGGPPCGL | 300 |
| | \|\|\|\|\|\|\|\|\|\|\|\|\|\|\|\|\|\|\|\|\|\|\|\|\|\|\|\|\|\|\|\|\|\|\|\|\|\|\|\|\|\|\|\|\|\|\|\|\|\| | |
| 251 | LSVDLERYYQTENEDESPFICSQPRENGMRSCRSVPTLRGDGGGGPPCGL | 300 |
| | . . . . . | |
| 301 | DYEAYNSSSNTTCVNWNQYYTNCSAGEHNPFKGAINFDNIGYAWIAIFQV | 350 |
| | \|\|\|\|\|\|\|\|\|\|\|\|\|\|\|\|\|\|\|\|\|\|\|\|\|\|\|\|\|\|\|\|\|\|\|\|\|\|\|\|\|\|\|\|\|\|\|\|\|\| | |
| 301 | DYEAYNSSSNTTCVNWNQYYTNCSAGEHNPFKGAINFDNIGYAWIAIFQV | 350 |
| | . . . . . | |
| 351 | ITLEGWVDIMYFVMDAHSFYNFIYFILLIIVGSEFMINLCLVVIATQFSE | 400 |
| | \|\|\|\|\|\|\|\|\|\|\|\|\|\|\|\|\|\|\|\|\|\|\|\|\|\|\|\|\|\|\|\|\|\|\|\|\|\|\|\|\|\|\|\|\|\|\|\|\|\| | |
| 351 | ITLEGWVDIMYFVMDAHSFYNFIYFILLIIVGSFFMINLCLVVIATQFSE | 400 |
| | . . . . . | |
| 401 | TKQRESQLMREQRVRFLSNASTLASFSEPGSCYEELLKYLVYILRKAARR | 450 |
| | \|\|\|\|\|\|\|\|\|\|\|\|\|\|\|\|\|\|\|\|\|\|\|\|\|\|\|\|\|\|\|\|\|\|\|\|\|\|\|\|\|\|\|\|\|\|\|\|\|\| | |
| 401 | TKQRESQLMREQRVRFLSNASTLASFSEPGSCYEELLKYLVYILRKAARR | 450 |
| | . . . . . | |
| 451 | LAQVSRAAGVRVGLLSSPAPLGGQETQPSSSCSRSHRRLSVHHLVHHHHH | 500 |
| | \|\|\|\|\|\|\|\|\|\|\|\|\|\|\|\|\|\|\|\|\|\|\|\|\|\|\|\|\|\|\|\|\|\|\|\|\|\|\|\|\|\|\|\|\|\|\|\|\|\| | |
| 451 | LAQVSRAAGVRVGLLSSPAPLGGQETQPSSSCSRSHRRLSVHHLVHHHHH | 500 |
| | . . . . . | |
| 501 | HHHHYHLGNGTLRAPRASPEIQDRDANGSRRLMLPPPSTPALSGAPPGGA | 550 |
| | \|\|\|\|\|\|\|\|\|\|\|\|\|\|\|\|\|\|\|\|\|\|\|\|\|\|\|\|\|\|\|\|\|\|\|\|\|\|\|\|\|\|\|\|\|\|\|\|\|\| | |
| 501 | HHHHYHLGNGTLRAPRASPEIQDRDANGSRRLMLPPPSTPALSGAPPGGA | 550 |
| | . . . . . | |
| 551 | ESVHSFYHADCHLEPVRCQAPPPRSPSEASGRTVGSGKVYPTVHTSPPPE | 600 |
| | \|\|\|\|\|\|\|\|\|\|\|\|\|\|\|\|\|\|\|\|\|\|\|\|\|\|\|\|\|\|\|\|\|\|\|\|\|\|\|\|\|\|\|\|\|\|\|\|\|\| | |
| 551 | ESVHSFYHADCHLEPVRCQAPPPRSPSEASGRTVGSGKVYPTVHTSPPPE | 600 |
| | . . . . . | |
| 601 | TLKEKALVEVAASSGPPTLTSLNIPPGPYSSMHKLLETQSTGACQSSCKI | 650 |
| | \|\|\|\|\|\|\|\|\|\|\|\|\|\|\|\|\|\|\|\|\|\|\|\|\|\|\|\|\|\|\|\|\|\|\|\|\|\|\|\|\|\|\|\|\|\|\|\|\|\| | |
| 601 | TLKEKALVEVAASSGPPTLTSLNIPPGPYSSMHKLLETQSTGACQSSCKI | 650 |
| | . . . . . | |
| 651 | SSPCLKADSGACGPDSCPYCARAGAGEVELADREMPDSDSEAVYEFTQDA | 700 |
| | \|\|\|\|\|\|\|\|\|\|\|\|\|\|\|\|\|\|\|\|\|\|\|\|\|\|\|\|\|\|\|\|\|\|\|\|\|\|\|\|\|\|\|\|\|\|\|\|\|\| | |
| 651 | SSPCLKADSGACGPDSCPYCARAGAGEVELADREMPDSDSEAVYEFTQDA | 700 |
| | . . . . . | |
| 701 | QHSDLRDPHSRRQRSLGPDAEPSSVLAFWRLICDTFRKIVDSKYFGRGIM | 750 |
| | \|\|\|\|\|\|\|\|\|\|\|\|\|\|\|\|\|\|\|\|\|\|\|\|\|\|\|\|\|\|\|\|\|\|\|\|\|\|\|\|\|\|\|\|\|\|\|\|\|\| | |
| 701 | QHSDLRDPHSRRQRSLGPDAEPSSVLAFWRLICDTFRKIVDSKYFGRGIM | 750 |
| | . . . . . | |
| 751 | IAILVNTLSMGIEYHEQPEELTNALEISNIVFTSLFALEMLLKLLVYGPF | 800 |
| | \|\|\|\|\|\|\|\|\|\|\|\|\|\|\|\|\|\|\|\|\|\|\|\|\|\|\|\|\|\|\|\|\|\|\|\|\|\|\|\|\|\|\|\|\|\|\|\|\|\| | |
| 751 | IAILVNTLSMGIEYHEQPEELTNALEISNIVFTSLFALEMLLKLLVYGPF | 800 |
| | . . . . . | |
| 801 | GYIKNPYNIFDGVIVVISVWEIVGQQGGGLSVLRTFRLMRVLKLVRFLPA | 850 |
| | \|\|\|\|\|\|\|\|\|\|\|\|\|\|\|\|\|\|\|\|\|\|\|\|\|\|\|\|\|\|\|\|\|\|\|\|\|\|\|\|\|\|\|\|\|\|\|\|\|\| | |
| 801 | GYIKNPYNIFDGVIVVISVWEIVGQQGGGLSVLRTFRLMRVLKLVRFLPA | 850 |
| | . . . . . | |
| 851 | LQRQLVVLMKTMDNVATFCMLLMLFIFIFSILGMHLFGCKFASERDGDTL | 900 |
| | \|\|\|\|\|\|\|\|\|\|\|\|\|\|\|\|\|\|\|\|\|\|\|\|\|\|\|\|\|\|\|\|\|\|\|\|\|\|\|\|\|\|\|\|\|\|\|\|\|\| | |
| 851 | LQRQLVVLMKTMDNVATFCMLLMLFIFIFSILGMHLFGCKFASERDGDTL | 900 |
| | . . . . . | |
| 901 | PDRKNFDSLLWAIVTVFQILTQEDWNKVLYNGMASTSSWAALYFIALMTF | 950 |
| | \|\|\|\|\|\|\|\|\|\|\|\|\|\|\|\|\|\|\|\|\|\|\|\|\|\|\|\|\|\|\|\|\|\|\|\|\|\|\|\|\|\|\|\|\|\|\|\|\|\| | |
| 901 | PDRKNFDSLLWAIVTVFQILTQEDWNKVLYNGMASTSSWAALYFIALMTF | 950 |
| | . . . . . | |
| 951 | GNYVLFNLLVAILVEGFQAE.......................GDANKSE | 977 |
| | \|\|\|\|\|\|\|\|\|\|\|\|\|\|\|\|\|\|\|\| \|\|\|\|\|\|\| | |
| 951 | GNYVLFNLLVAILVEGFQAEEISKREDASGQLSCIQLPVDSQGGDANKSE | 1000 |
| | . . . . . | |
| 978 | SEPDFFSPSLDGDGDRKKCLALVSLGEHPELRKSLLPPLIIHTAATPMSL | 1027 |
| | \|\|\|\|\|\|\|\|\|\|\|\|\|\|\|\|\|\|\|\|\|\|\|\|\|\|\|\|\|\|\|\|\|\|\|\|\|\|\|\|\|\|\|\|\|\|\|\|\|\| | |
| 1001 | SEPDFFSPSLDGDGDRKKCLALVSLGEHPELRKSLLPPLIIHTAATPMSL | 1050 |
| | . . . . . | |
| 1028 | PKSTSTGLGEALGPASRRTSSSGSAEPGAAHEMKSPPSARSSPHSPWSAA | 1077 |
| | \|\|\|\|\|\|\|\|\|\|\|\|\|\|\|\|\|\|\|\|\|\|\|\|\|\|\|\|\|\|\|\|\|\|\|\|\|\|\|\|\|\|\|\|\|\|\|\|\|\| | |
| 1051 | PKSTSTGLGEALGPASRRTSSSGSAEPGAAHEMKSPPSARSSPHSPWSAA | 1100 |
| | . . . . . | |
| 1078 | SSWTSRRSSRNSLGRAPSLKRRSPSGERRSLLSGEGQESQDEEESSEEER | 1127 |
| | \|\|\|\|\|\|\|\|\|\|\|\|\|\|\|\|\|\|\|\|\|\|\|\|\|\|\|\|\|\|\|\|\|\|\|\|\|\|\|\|\|\|\|\|\|\|\|\|\|\| | |
| 1101 | SSWTSRRSSRNSLGRAPSLKRRSPSGERRSLLSGEGQESQDEEESSEEER | 1150 |
| | . . . . . | |
| 1128 | ASPAGSDHRHRGSLEREAKSSFDLPDTLQVPGLHRTASGRGSASEHQDCN | 1177 |
| | \|\|\|\|\|\|\|\|\|\|\|\|\|\|\|\|\|\|\|\|\|\|\|\|\|\|\|\|\|\|\|\|\|\|\|\|\|\|\|\|\|\|\|\|\|\|\|\|\|\| | |
| 1151 | ASPAGSDHRHRGSLEREAKSSFDLPDTLQVPGLHRTASGRGSASEHQDCN | 1200 |
| | . . . . . | |
| 1178 | GKSASGRLARALRPDDPPLDGDDADDEGNLSKGERVRAWIRARLPACCLE | 1227 |
| | \|\|\|\|\|\|\|\|\|\|\|\|\|\|\|\|\|\|\|\|\|\|\|\|\|\|\|\|\|\|\|\|\|\|\|\|\|\|\|\|\|\|\|\|\|\|\|\|\|\| | |
| 1201 | GKSASGRLARALRPDDPPLDGDDADDEGNLSKGERVRAWIRARLPACCLE | 1250 |
| | . . . . . | |
| 1228 | RDSWSAYIFPPQSRFRLLCHRIITHKMFDHVVLVIIFLNCITIAMERPKI | 1277 |
| | \|\|\|\|\|\|\|\|\|\|\|\|\|\|\|\|\|\|\|\|\|\|\|\|\|\|\|\|\|\|\|\|\|\|\|\|\|\|\|\|\|\|\|\|\|\|\|\|\|\| | |
| 1251 | RDSWSAYIFPPQSRFRLLCHRIITHKMFDHVVLVIIFLNCITIAMERPKI | 1300 |
| | . . . . . | |
| 1278 | DPHSAERIFLTLSNYIFTAVFLAEMTVKVVALGWCFGEQAYLRSSWNVLD | 1327 |
| | \|\|\|\|\|\|\|\|\|\|\|\|\|\|\|\|\|\|\|\|\|\|\|\|\|\|\|\|\|\|\|\|\|\|\|\|\|\|\|\|\|\|\|\|\|\|\|\|\|\| | |
| 1301 | DPHSAERIFLTLSNYIFTAVFLAEMTVKVVALGWCFGEQAYLRSSWNVLD | 1350 |
| | . . . . . | |
| 1328 | GLLVLISVIDILVSMVSDSGTKILGMLRVLRLLRTLRPLRVISRAQGLKL | 1377 |
| | \|\|\|\|\|\|\|\|\|\|\|\|\|\|\|\|\|\|\|\|\|\|\|\|\|\|\|\|\|\|\|\|\|\|\|\|\|\|\|\|\|\|\|\|\|\|\|\|\|\| | |
| 1351 | GLLVLISVIDILVSMVSDSGTKILGMLRVLRLLRTLRPLRVISRAQGLKL | 1400 |
| | . . . . . | |
| 1378 | VVETLMSSLKPIGNIVVICCAFFIIFGILGVQLFKGKFFVCQGEDTRNIT | 1427 |
| | \|\|\|\|\|\|\|\|\|\|\|\|\|\|\|\|\|\|\|\|\|\|\|\|\|\|\|\|\|\|\|\|\|\|\|\|\|\|\|\|\|\|\|\|\|\|\|\|\|\| | |
| 1401 | VVETLMSSLKP1TGNIWICCAFFIIFGILGVQLFKGKFFVCQGEDTRNIT | 1450 |
| | . . . . . | |
| 1428 | NKSDCAEASYRWVRHKYNFDNLGQALMSLFVLASKDGWVDIMYDGLDAVG | 1477 |
| | \|\|\|\|\|\|\|\|\|\|\|\|\|\|\|\|\|\|\|\|\|\|\|\|\|\|\|\|\|\|\|\|\|\|\|\|\|\|\|\|\|\|\|\|\|\|\|\|\|\| | |
| 1451 | NKSDCAEASYRWVRHKYNFDNLGQALMSLFVLASKDGWVDIMYDGLDAVG | 1500 |
| 1478 | VDQQ | 1481 |
| | \|\|\|\| | |
| 1501 | VDQQ | 1504 |

### EXAMPLE 11

[0300] This Example relates to the variant T80376_P2 (SEQ ID NO:1; the nucleic acid sequence is given by SEQ ID NO:23), which is a variant alpha 1 subunit according to the present invention, and more specifically, is a splice variant of the known protein CCAH_HUMAN, which is encoded by the CACNA1H gene. This alpha subunit is the alpha 1H subunit, which forms the voltage-dependent T-type calcium channel. It is also known as alpha subunit Cav3.2.

[0301] T-type calcium channels belong to the “low-voltage activated (LVA)” group and are strongly blocked by nickel and mibefradil as described above with regard to Example 10. T-type channels serve pacemaking functions in both central neurons and cardiac nodal cells and support calcium signaling in secretory cells and vascular smooth muscle. They may also be involved in the modulation of firing patterns of neurons. This alpha subunit is expressed in kidney, liver, heart, brain; at least one isoform (Isoform 2) seems to be testis-specific.

[0302] This alpha subunit has the following structure. Each of the four internal repeats contains five hydrophobic transmembrane segments (S1, S2, S3, S5, S6) and one positively charged transmembrane segment (S4). S4 segments probably represent the voltage-sensor and are characterized by a series of positively charged amino acids at every third position. In response to an increase in intracellular calcium, the T-type channels are activated by CaM-kinase II.

[0303] The structure of the splice variant according to the present invention features a skipped exon, as compared to the known protein sequence. An alignment is provided at the end of this section, while the comparison between the two sequences is described below.

[0304] According to preferred embodiments of the present invention, there is provided an isolated chimeric polypeptide encoding for T80376_P2, comprising a first amino acid sequence being at least 90% homologous to (SEQ ID NO: 117) MTEGARAADEVRVPLGAPPPGPAALVGASPESPGAPGREAERGSELGVSPSESPAAERGAELGADEEQRVPYPALAATVFFCLGQTTRPRSWCLRLVCNPWFEHVSMLVIMLNCVTLGMFRPCEDVECGSERCNILEAFDAFIFAFFAVEMVIKMVALGLFGQKCYLGDTWNRLDFFIVVAGMMEYSLDGHNVSLSAIRTVRVLRPLRAINRVPSMRILVTLLLDTLPMLGNVLLLCFFVFFIFGIVGVQLWAGLLRNRCFLDSAFVRNNNLTFLRPYYQTEEGEENPFICSSRRDNGMQKCSHIPGRRELRMPCTLGWEAYTQPQAEGVGAARNACINWNQYYNVCRSGDSNPHNGAINFDNIGYAWIAIFQVITLEGWVDIMYYVMDAHSFYNFIYFILLIIVGSFFMINLCLVVIATQFSETKQRESQLMREQRARHLSNDSTLASFSEPGSCYEELLKYVGHIFRKVKRRSLRLYARWQSRWRKKVDPSAVQGQGPGHRQRRAGRHTASVHHLVYHHHHHHHHHYHFSHGSPRRPGPEPGACDTRLVRAGAPPSPPSPGRGPPDAESVHSIYHADCHIEGPQERARVAHAAATAAASLRLATGLGTMNYPTILPSGVGSGKGSTSPGPKGKWAGGPPGTGGHGPLSLNSPDPYEKIPHVVGEHGLGQAPGHLSGLSVPCPLPSPPAGTLTCELKSCPYCTRALEDPEGELSGSESGDSDGRGVYEFTQDVRHGDRWDPTRPPRATDTPGPGPGSPQRRAQQRAAPGEPGWMGRLWVTFSGKLRRIVDSKYFSRGIMMAILVNTLSMGVEYHEQPEELTNALEISNIVFTSMFALEMLLKLLACGPLGYIRNPYNIFDGIIVVISVWEIVGQADGGLSVLRTFRLLRVLKLVRFLPALRRQLVVLVKTMDNVATFCTLLMLFIFIFSILGMHLFGCKFSLKTDTGDTVPDRKNFDSLLWAIVTVFQILTQEDWNVVLYNGMASTSSWAALYFVALMTFGNYVLFNLLVAILVEGFQAEGDANRSDTDEDKTSVHFEEDFHKLRELQTTELKMCSLAVTPNGHLEGRGSLSPPLIMCTAATPMPTPKSSPFLDAAPSLPDSRRGSSSSGDPPLGDQKPPASLRSSPCAPWGPSGAWSSRRSSWSSLGRAPSLKRRGQCGERESLLSGEGKGSTDDEAEDGRAAPGPRATPLRRAESLDPRPLRPAALPPTKCRDRDGQVVALPSDFFLRIDSHREDAAELDDDSEDSCCLRLHKVLEPYKPQWCRSREAWALYLFSPQNRFRVSCQKVITHKMFDHVVLVFIFLNCVTIALERPDIDPGSTERVFLSVSNYIFTAIFVAEMMVKVVALGLLSGEHAYLQSSWNLLDGLLVLVSLVDIVVAMASAGGAKILGVLRVLRLLRTLRPLRVISRAPGLKLVVETLISSLRPIGNIVLICCAFFIIFGILGVQLFKGKFYYCEGPDTRNISTKAQCRAAHYRWVRRKYNFDNLGQALMSLFVLSSKDGWVNIMYDGLDAVGVDQQPVQNHNPWMLLYFISFLLIVSFFVLNMFVGVVVENFHKCRQHQEAEEARRREEKRLRRLERRRR corresponding to amino acids 1-1586 of CCAH_HUMAN, which also corresponds to amino acids 1-1586 of T80376_P2, a second amino acid sequence bridging amino acid sequence comprising of K, and a third amino acid sequence being at least 90% homologous to (SEQ ID NO: 118) AQRRPYYADYSPTRRSIHSLCTSHYLDLFITFIICVNVITMSMEHYNQPKSLDEALKYCNYVFTIVFVFEAALKLVAFGFRRFFKDRWNQLDLAIVLLSLMGITLEEIEMSAALPINPTIIRIMRVLRIARVLKLLKMATGMRALLDTVVQALPQVGNLGLLFMLLFFIYAALGVELFGRLECSEDNPCEGLSRHATFSNFGMAFLTLFRVSTGDNWNGIMKDTLRECSREDKHCLSYLPALSPVYFVTFVLVAQFVLVNVVVAVLMKHLEESNKEAREDAELDAEIELEMAQGPGSARRVDADRPPLPQESPGARDAPNLVARKVSVSRMLSLPNDSYMFRPVVPASAPHPRPLQEVEMETYGAGTPLGSVASVHSPPAESCASLQIPLAVSSPARSGEPLHALSPRGTARSPSLSRLLCRQEAVHTDSLEGKIDSPRDTLDPAEPGEKTPVRPVTQGGSLQSPPRSPRPASVRTRKHTFGQRCVSSRPAAPGGEEAEASDPADEEVSHITSSACPWQPTAEPHGPEASPVAGGERDLRRLYSVDAQGFLDKPGRADEQWRPSAELGSGEPGEAKAWGPEAEPALGARRKKKMSPPCISVEPPAEDEGSARPSAAEGGSTTLRRRTPSCEATPHRDSLEPTEGSGAGGDPAAKGERWGQASCRAEHLTVPSFAFEPLDLGVPSGDPFLDGSHSVTPESRASSSGAIVPLEPPESEPPMPVGDPPEKRRGLYLTVPQCPLEKPGSPSATPAPGGGADDPV corresponding to amino acids 1594-2353 of CCAH_HUMAN, which also corresponds to amino acids 1588-2347 of T80376_P2, wherein said first amino acid sequence, second amino acid sequence and third amino acid sequence are contiguous and in a sequential order.

[0305] According to preferred embodiments of the present invention, there is provided an isolated polypeptide encoding for an edge portion of T80376_P2, comprising a polypeptide having a length “n”, wherein n is at least about 10 amino acids in length, optionally at least about 20 amino acids in length, preferably at least about 30 amino acids in length, more preferably at least about 40 amino acids in length and most preferably at least about 50 amino acids in length, wherein at least three amino acids comprise RKA having a structure as follows (numbering according to T80376_P2): a sequence starting from any of amino acid numbers 1586−x to 1586; and ending at any of amino acid numbers 1588+((n−2)−x), in which x varies from 0 to n−2.

[0306] Domains affected by alternative splicing include the cytoplasmic loop between domain III and domain IV, and the cytoplasmic C-terminus region of the protein. An explanation of expected effects may be found in Examples 2 and 9.

[0307] From the above description of the effect of changes to the C-terminus domain of this variant, it is expected that the variant will influence neuronal function in such a manner that the slowly inactivating variants would be liable to sustain firing patterns.

[0308] From the above description of the effect of changes to the cytoplasmic loop between domain III and domain IV of this variant, it is expected that the variant will have a right shift of activation and inactivation and slowing of activation kinetics or a left shift of inactivation and accelerated activation kinetics.

Sequence name: CCAH_HUMAN

documentation:

of: T80376_P2 (SEQ ID NO: 1)×CCAH_HUMAN (SEQ ID NO: 119) . . .

segment 1/1:

[0309] Quality: 22970.00

Escore: 0

Matching length: 2347 Total

length: 2353

Matching Percent Similarity: 100.00 Matching Percent

Identity: 99.96

Total Percent Similarity: 99.75 Total Percent

Identity: 99.70

[0310] Gaps: 1

| | . . . . . | |
|---|---|---|
| 1 | MTEGARAADEVRVPLGAPPPGPAALVGASPESPGAPGREAERGSELGVSP | 50 |
| | \|\|\|\|\|\|\|\|\|\|\|\|\|\|\|\|\|\|\|\|\|\|\|\|\|\|\|\|\|\|\|\|\|\|\|\|\|\|\|\|\|\|\|\|\|\|\|\|\|\| | |
| 1 | MTEGARAADEVRVPLGAPPPGPAALVGASPESPGAPGREAERGSELGVSP | 50 |
| | . . . . . | |
| 51 | SESPAAERGAELGADEEQRVPYPALAATVFFCLGQTTRPRSWCLRLVCNP | 100 |
| | \|\|\|\|\|\|\|\|\|\|\|\|\|\|\|\|\|\|\|\|\|\|\|\|\|\|\|\|\|\|\|\|\|\|\|\|\|\|\|\|\|\|\|\|\|\|\|\|\|\| | |
| 51 | SESPAAERGAELGADEEQRVPYPALAATVFFCLGQTTRPRSWCLRLVCNP | 100 |
| | . . . . . | |
| 101 | WFEHVSMLVIMLNCVTLGMFRPCEDVECGSERCNILEAFDAFIFAFFAVE | 150 |
| | \|\|\|\|\|\|\|\|\|\|\|\|\|\|\|\|\|\|\|\|\|\|\|\|\|\|\|\|\|\|\|\|\|\|\|\|\|\|\|\|\|\|\|\|\|\|\|\|\|\| | |
| 101 | WFEHVSMLVIMLNCVTLGMFRPCEDVECGSERCNILEAFDAFIFAFFAVE | 150 |
| | . . . . . | |
| 151 | MVTKMVALGLFGQKCYLGDTWNRLDFFIVVAGMMEYSLDGHNVSLSAIRT | 200 |
| | \|\|\|\|\|\|\|\|\|\|\|\|\|\|\|\|\|\|\|\|\|\|\|\|\|\|\|\|\|\|\|\|\|\|\|\|\|\|\|\|\|\|\|\|\|\|\|\|\|\| | |
| 151 | MVIKMVALGLFGQKCYLGDTWNRLDFFIVVAGMMEYSLDGHNVSLSAIRT | 200 |
| | . . . . . | |
| 201 | VRVLRPLRAINRVPSMRILVTLLLDTLPMLGNVLLLCFFVFFIFGIVGVQ | 250 |
| | \|\|\|\|\|\|\|\|\|\|\|\|\|\|\|\|\|\|\|\|\|\|\|\|\|\|\|\|\|\|\|\|\|\|\|\|\|\|\|\|\|\|\|\|\|\|\|\|\|\| | |
| 201 | VRVLRPLRAINRVPSMRILVTLLLDTLPMLGNVLLLCFFVFFIFGIVGVQ | 250 |
| | . . . . . | |
| 251 | LWAGLLRNRCFLDSAFVRNNNLTFLRPYYQTEEGEENPFICSSRRDNGMQ | 300 |
| | \|\|\|\|\|\|\|\|\|\|\|\|\|\|\|\|\|\|\|\|\|\|\|\|\|\|\|\|\|\|\|\|\|\|\|\|\|\|\|\|\|\|\|\|\|\|\|\|\|\| | |
| 251 | LWAGLLRNRCFLDSAFVRNNNLTFLRPYYQTEEGEENPFICSSRRDNGMQ | 300 |
| | . . . . . | |
| 301 | KCSHIPGRRELRMPCTLGWEAYTQPQAEGVGAARNACINWNQYYNVCRSG | 350 |
| | \|\|\|\|\|\|\|\|\|\|\|\|\|\|\|\|\|\|\|\|\|\|\|\|\|\|\|\|\|\|\|\|\|\|\|\|\|\|\|\|\|\|\|\|\|\|\|\|\|\| | |
| 301 | KCSHIPGRRELRMPCTLGWEAYTQPQAEGVGAARNACINWNQYYNVCRSG | 350 |
| | . . . . . | |
| 351 | DSNPHNGAINFDNIGYAWIAIFQVITLEGWVDIMYYVMDAHSFYNFIYFI | 400 |
| | \|\|\|\|\|\|\|\|\|\|\|\|\|\|\|\|\|\|\|\|\|\|\|\|\|\|\|\|\|\|\|\|\|\|\|\|\|\|\|\|\|\|\|\|\|\|\|\|\|\| | |
| 351 | DSNPHNGAINFDNIGYAWIAIFQVITLEGWVDIMYYVMDAHSFYNFIYFI | 400 |
| | . . . . . | |
| 401 | LLIIVGSFFMINLCLVVIATQFSETKQRESQLMREQRARHLSNDSTLASF | 450 |
| | \|\|\|\|\|\|\|\|\|\|\|\|\|\|\|\|\|\|\|\|\|\|\|\|\|\|\|\|\|\|\|\|\|\|\|\|\|\|\|\|\|\|\|\|\|\|\|\|\|\| | |
| 401 | LLIIVGSFFMINLCLVVIATQFSETKQRESQLMREQRARHLSNDSTLASF | 450 |
| | . . . . . | |
| 451 | SEPGSCYEELLKYVGHIFRKVKRRSLRLYARWQSRWRKKVDPSAVQGQGP | 500 |
| | \|\|\|\|\|\|\|\|\|\|\|\|\|\|\|\|\|\|\|\|\|\|\|\|\|\|\|\|\|\|\|\|\|\|\|\|\|\|\|\|\|\|\|\|\|\|\|\|\|\| | |
| 451 | SEPGSCYEELLKYVGHIFRKVKRRSLRLYARWQSRWRKKVDPSAVQGQGP | 500 |
| | . . . . . | |
| 501 | GHRQRRAGRHTASVHHLVYHHHHHHHHHYHFSHGSPRRPGPEPGACDTRL | 550 |
| | \|\|\|\|\|\|\|\|\|\|\|\|\|\|\|\|\|\|\|\|\|\|\|\|\|\|\|\|\|\|\|\|\|\|\|\|\|\|\|\|\|\|\|\|\|\|\|\|\|\| | |
| 501 | GHRQRRAGRHTASVHHLVYHHHHHHHHHYHFSHGSPRRPGPEPGACDTRL | 550 |
| | . . . . . | |
| 551 | VRAGAPPSPPSPGRGPPDAESVHSIYHADCHIEGPQERARVAHAAATAAA | 600 |
| | \|\|\|\|\|\|\|\|\|\|\|\|\|\|\|\|\|\|\|\|\|\|\|\|\|\|\|\|\|\|\|\|\|\|\|\|\|\|\|\|\|\|\|\|\|\|\|\|\|\| | |
| 551 | VRAGAPPSPPSPGRGPPDAESVHSIYHADCHIEGPQERARVAHAAATAAA | 600 |
| | . . . . . | |
| 601 | SLRLATGLGTMNYPTILPSGVGSGKGSTSPGPKGKWAGGPPGTGGHGPLS | 650 |
| | \|\|\|\|\|\|\|\|\|\|\|\|\|\|\|\|\|\|\|\|\|\|\|\|\|\|\|\|\|\|\|\|\|\|\|\|\|\|\|\|\|\|\|\|\|\|\|\|\|\| | |
| 601 | SLRLATGLGTMNYPTILPSGVGSGKGSTSPGPKGKWAGGPPGTGGHGPLS | 650 |
| | . . . . . | |
| 651 | LNSPDPYEKIPHVVGEHGLGQAPGHLSGLSVPCPLPSPPAGTLTCELKSC | 700 |
| | \|\|\|\|\|\|\|\|\|\|\|\|\|\|\|\|\|\|\|\|\|\|\|\|\|\|\|\|\|\|\|\|\|\|\|\|\|\|\|\|\|\|\|\|\|\|\|\|\|\| | |
| 651 | LNSPDPYEKIPHVVGEHGLGQAPGHLSGLSVPCPLPSPPAGTLTCELKSC | 700 |
| | . . . . . | |
| 701 | PYCTRALEDPEGELSGSESGDSDGRGVYEFTQDVRHGDRWDPTRPPRATD | 750 |
| | \|\|\|\|\|\|\|\|\|\|\|\|\|\|\|\|\|\|\|\|\|\|\|\|\|\|\|\|\|\|\|\|\|\|\|\|\|\|\|\|\|\|\|\|\|\|\|\|\|\| | |
| 701 | PYCTRALEDPEGELSGSESGDSDGRGVYEFTQDVRHGDRWDPTRPPRATD | 750 |
| | . . . . . | |
| 751 | TPGPGPGSPQRRAQQRAAPGEPGWMGRLWVTFSGKLRRIVDSKYFSRGIM | 800 |
| | \|\|\|\|\|\|\|\|\|\|\|\|\|\|\|\|\|\|\|\|\|\|\|\|\|\|\|\|\|\|\|\|\|\|\|\|\|\|\|\|\|\|\|\|\|\|\|\|\|\| | |
| 751 | TPGPGPGSPQRRAQQRAAPGEPGWMGRLWVTFSGKLRRIVDSKYFSRGIM | 800 |
| | . . . . . | |
| 801 | MAILVNTLSMGVEYHEQPEELTNALEISNIVFTSMFALEMLLKLLACGPL | 850 |
| | \|\|\|\|\|\|\|\|\|\|\|\|\|\|\|\|\|\|\|\|\|\|\|\|\|\|\|\|\|\|\|\|\|\|\|\|\|\|\|\|\|\|\|\|\|\|\|\|\|\| | |
| 801 | MAILVNTLSMGVEYHEQPEELTNALEISNIVFTSMFALEMLLKLLACGPL | 850 |
| | . . . . . | |
| 851 | GYIRNPYNIFDGIIVVISVWEIVGQADGGLSVLRTFRLLRVLKLVRFLPA | 900 |
| | \|\|\|\|\|\|\|\|\|\|\|\|\|\|\|\|\|\|\|\|\|\|\|\|\|\|\|\|\|\|\|\|\|\|\|\|\|\|\|\|\|\|\|\|\|\|\|\|\|\| | |
| 851 | GYIRNPYNIFDGIIVVISVWEIVGQADGGLSVLRTFRLLRVLKLVRFLPA | 900 |
| | . . . . . | |
| 901 | LRRQLVVLVKTMDNVATFCTLLMLFIFIFSILGMHLFGCKFSLKTDTGDT | 950 |
| | \|\|\|\|\|\|\|\|\|\|\|\|\|\|\|\|\|\|\|\|\|\|\|\|\|\|\|\|\|\|\|\|\|\|\|\|\|\|\|\|\|\|\|\|\|\|\|\|\|\| | |
| 901 | LRRQLVVLVKTMDNVATFCTLLMLFIFIFSILGMHLFGCKFSLKTDTGDT | 950 |
| | . . . . . | |
| 951 | VPDRKNFDSLLWAIVTVFQILTQEDWNVVLYNGMASTSSWAALYFVALMT | 1000 |
| | \|\|\|\|\|\|\|\|\|\|\|\|\|\|\|\|\|\|\|\|\|\|\|\|\|\|\|\|\|\|\|\|\|\|\|\|\|\|\|\|\|\|\|\|\|\|\|\|\|\| | |
| 951 | VPDRKNFDSLLWAIVTVFQILTQEDWNVVLYNGMASTSSWAALYFVALMT | 1000 |
| | . . . . . | |
| 1001 | FGNYVLFNLLVAILVEGFQAEGDANRSDTDEDKTSVHFEEDFHKLRELQT | 1050 |
| | \|\|\|\|\|\|\|\|\|\|\|\|\|\|\|\|\|\|\|\|\|\|\|\|\|\|\|\|\|\|\|\|\|\|\|\|\|\|\|\|\|\|\|\|\|\|\|\|\|\| | |
| 1001 | FGNYVLFNLLVAILVEGFQAEGDANRSDTDEDKTSVHFEEDFHKLRELQT | 1050 |
| | . . . . . | |
| 1051 | TELKMCSLAVTPNGHLEGRGSLSPPLIMCTAATPMPTPKSSPFLDAAPSL | 1100 |
| | \|\|\|\|\|\|\|\|\|\|\|\|\|\|\|\|\|\|\|\|\|\|\|\|\|\|\|\|\|\|\|\|\|\|\|\|\|\|\|\|\|\|\|\|\|\|\|\|\|\| | |
| 1051 | TELKMCSLAVTPNGHLEGRGSLSPPLIMCTAATPMPTPKSSPFLDAAPSL | 1100 |
| | . . . . . | |
| 1101 | PDSRRGSSSSGDPPLGDQKPPASLRSSPCAPWGPSGAWSSRRSSWSSLGR | 1150 |
| | \|\|\|\|\|\|\|\|\|\|\|\|\|\|\|\|\|\|\|\|\|\|\|\|\|\|\|\|\|\|\|\|\|\|\|\|\|\|\|\|\|\|\|\|\|\|\|\|\|\| | |
| 1101 | PDSRRGSSSSGDPPLGDQKPPASLRSSPCAPWGPSGAWSSRRSSWSSLGR | 1150 |
| | . . . . . | |
| 1151 | APSLKRRGQCGERESLLSGEGKGSTDDEAEDGRAAPGPRATPLRRAESLD | 1200 |
| | \|\|\|\|\|\|\|\|\|\|\|\|\|\|\|\|\|\|\|\|\|\|\|\|\|\|\|\|\|\|\|\|\|\|\|\|\|\|\|\|\|\|\|\|\|\|\|\|\|\| | |
| 1151 | APSLKRRGQCGERESLLSGEGKGSTDDEAEDGRAAPGPRATPLRRAESLD | 1200 |
| | . . . . . | |
| 1201 | PRPLRPAALPPTKCRDRDGQVVALPSDFFLRIDSHREDAAELDDDSEDSC | 1250 |
| | \|\|\|\|\|\|\|\|\|\|\|\|\|\|\|\|\|\|\|\|\|\|\|\|\|\|\|\|\|\|\|\|\|\|\|\|\|\|\|\|\|\|\|\|\|\|\|\|\|\| | |
| 1201 | PRPLRPAALPPTKCRDRDGQVVALPSDFFLRIDSHREDAAELDDDSEDSC | 1250 |
| | . . . . . | |
| 1251 | CLRLHKVLEPYKPQWCRSREAWALYLFSPQNRFRVSCQKVITHKMFDHVV | 1300 |
| | \|\|\|\|\|\|\|\|\|\|\|\|\|\|\|\|\|\|\|\|\|\|\|\|\|\|\|\|\|\|\|\|\|\|\|\|\|\|\|\|\|\|\|\|\|\|\|\|\|\| | |
| 1251 | CLRLHKVLEPYKPQWCRSREAWALYLFSPQNRFRVSCQKVITHKMFDHVV | 1300 |
| | . . . . . | |
| 1301 | LVFIFLNCVTIALERPDIDPGSTERVFLSVSNYIFTAIFVAEMMVKVVAL | 1350 |
| | \|\|\|\|\|\|\|\|\|\|\|\|\|\|\|\|\|\|\|\|\|\|\|\|\|\|\|\|\|\|\|\|\|\|\|\|\|\|\|\|\|\|\|\|\|\|\|\|\|\| | |
| 1301 | LVFLFLNCVTIALERPDIDPGSTERVFLSVSNYIFTAIFVAEMMVKVVAL | 1350 |
| | . . . . . | |
| 1351 | GLLSGEHAYLQSSWNLLDGLLVLVSLVDIVVAMASAGGAKILGVLRVLRL | 1400 |
| | \|\|\|\|\|\|\|\|\|\|\|\|\|\|\|\|\|\|\|\|\|\|\|\|\|\|\|\|\|\|\|\|\|\|\|\|\|\|\|\|\|\|\|\|\|\|\|\|\|\| | |
| 1351 | GLLSGEHAYLQSSWNLLDGLLVLVSLVDIVVAMASAGGAKILGVLRVLRL | 1400 |
| | . . . . . | |
| 1401 | LRTLRPLRVISRAPGLKLVVETLISSLRPIGNIVLICCAFFIIFGILGVQ | 1450 |
| | \|\|\|\|\|\|\|\|\|\|\|\|\|\|\|\|\|\|\|\|\|\|\|\|\|\|\|\|\|\|\|\|\|\|\|\|\|\|\|\|\|\|\|\|\|\|\|\|\|\| | |
| 1401 | LRTLRPLRVISRAPGLKLVVETLISSLRPIGNIVLICCAFFIIFGILGVQ | 1450 |
| | . . . . . | |
| 1451 | LFKGKFYYCEGPDTRNISTKAQCRAAHYRWVRRKYNFDNLGQALMSLFVL | 1500 |
| | \|\|\|\|\|\|\|\|\|\|\|\|\|\|\|\|\|\|\|\|\|\|\|\|\|\|\|\|\|\|\|\|\|\|\|\|\|\|\|\|\|\|\|\|\|\|\|\|\|\| | |
| 1451 | LFKGKFYYCEGPDTRNISTKAQCRAAHYRWVRRKYNFDNLGQALMSLFVL | 1500 |
| | . . . . . | |
| 1501 | SSKDGWVNIMYDGLDAVGVDQQPVQNHNPWMLLYFISFLLIVSFFVLNMF | 1550 |
| | \|\|\|\|\|\|\|\|\|\|\|\|\|\|\|\|\|\|\|\|\|\|\|\|\|\|\|\|\|\|\|\|\|\|\|\|\|\|\|\|\|\|\|\|\|\|\|\|\|\| | |
| 1501 | SSKDGWVNIMYDGLDAVGVDQQPVQNHNPWMLLYFISFLLIVSFFVLNMF | 1550 |
| | . . . . . | |
| 1551 | VGVVVENFHKCRQHQEAEEARRREEKRLRRLERRRR......KAQRRPYY | 1594 |
| | \|\|\|\|\|\|\|\|\|\|\|\|\|\|\|\|\|\|\|\|\|\|\|\|\|\|\|\|\|\|\|\|\|\|\|\| \|\|\|\|\|\|\|\| | |
| 1551 | VGVVVENFHKCRQHQEAEEARRREEKRLRRLERRRRSTFPSPEAQRRPYY | 1600 |
| | . . . . . | |
| 1595 | ADYSPTRRSIHSLCTSHYLDLFITFIICVNVITMSMEHYNQPKSLDEALK | 1644 |
| | \|\|\|\|\|\|\|\|\|\|\|\|\|\|\|\|\|\|\|\|\|\|\|\|\|\|\|\|\|\|\|\|\|\|\|\|\|\|\|\|\|\|\|\|\|\|\|\|\|\| | |
| 1601 | ADYSPTRRSIHSLCTSHYLDLFITFIICVNVITMSMEHYNQPKSLDEALK | 1650 |
| | . . . . . | |
| 1645 | YCNYVFTIVFVFEAALKLVAFGFRRFFKDRWNQLDLAIVLLSLMGITLEE | 1694 |
| | \|\|\|\|\|\|\|\|\|\|\|\|\|\|\|\|\|\|\|\|\|\|\|\|\|\|\|\|\|\|\|\|\|\|\|\|\|\|\|\|\|\|\|\|\|\|\|\|\|\| | |
| 1651 | YCNYVFTIVFVFEAALKLVAFGFRRFFKDRWNQLDLAIVLLSLMGITLEE | 1700 |
| | . . . . . | |
| 1695 | IEMSAALPINPTIIRIMRVLRIARVLKLLKMATGMRALLDTVVQALPQVG | 1744 |
| | \|\|\|\|\|\|\|\|\|\|\|\|\|\|\|\|\|\|\|\|\|\|\|\|\|\|\|\|\|\|\|\|\|\|\|\|\|\|\|\|\|\|\|\|\|\|\|\|\|\| | |
| 1701 | IEMSAALPINPTIIRIMRVLRIARVLKLLKMATGMRALLDTVVQALPQVG | 1750 |
| | . . . . . | |
| 1745 | NLGLLFMLLFFIYAALGVELFGRLECSEDNPCEGLSRHATFSNFGMAFLT | 1794 |
| | \|\|\|\|\|\|\|\|\|\|\|\|\|\|\|\|\|\|\|\|\|\|\|\|\|\|\|\|\|\|\|\|\|\|\|\|\|\|\|\|\|\|\|\|\|\|\|\|\|\| | |
| 1751 | NLGLLFMLLFFIYAALGVELFGRLECSEDNPCEGLSRHATFSNFGMAFLT | 1800 |
| | . . . . . | |
| 1795 | LFRVSTGDNWNGIMKDTLRECSREDKHCLSYLPALSPVYFVTFVLVAQFV | 1844 |
| | \|\|\|\|\|\|\|\|\|\|\|\|\|\|\|\|\|\|\|\|\|\|\|\|\|\|\|\|\|\|\|\|\|\|\|\|\|\|\|\|\|\|\|\|\|\|\|\|\|\| | |
| 1801 | LFRVSTGDNWNGIMKDTLRECSREDKHCLSYLPALSPVYFVTFVLVAQFV | 1850 |
| | . . . . . | |
| 1845 | LVNVVVAVLMKHLEESNKEAREDAELDAEIELEMAQGPGSARRVDADRPP | 1894 |
| | \|\|\|\|\|\|\|\|\|\|\|\|\|\|\|\|\|\|\|\|\|\|\|\|\|\|\|\|\|\|\|\|\|\|\|\|\|\|\|\|\|\|\|\|\|\|\|\|\|\| | |
| 1851 | LVNVVVAVLMKHLEESNKEAREDAELDAEIELEMAQGPGSARRVDADRPP | 1900 |
| | . . . . . | |
| 1895 | LPQESPGARDAPNLVARKVSVSRMLSLPNDSYMFRPVVPASAPHPRPLQE | 1944 |
| | \|\|\|\|\|\|\|\|\|\|\|\|\|\|\|\|\|\|\|\|\|\|\|\|\|\|\|\|\|\|\|\|\|\|\|\|\|\|\|\|\|\|\|\|\|\|\|\|\|\| | |
| 1901 | LPQESPGARDAPNLVARKVSVSRMLSLPNDSYMFRPVVPASAPHPRPLQE | 1950 |
| | . . . . . | |
| 1945 | VEMETYGAGTPLGSVASVHSPPAESCASLQIPLAVSSPARSGEPLHALSP | 1994 |
| | \|\|\|\|\|\|\|\|\|\|\|\|\|\|\|\|\|\|\|\|\|\|\|\|\|\|\|\|\|\|\|\|\|\|\|\|\|\|\|\|\|\|\|\|\|\|\|\|\|\| | |
| 1951 | VEMETYGAGTPLGSVASVHSPPAESCASLQIPLAVSSPARSGEPLHALSP | 2000 |
| | . . . . . | |
| 1995 | RGTARSPSLSRLLCRQEAVHTDSLEGKIDSPRDTLDPAEPGEKTPVRPVT | 2044 |
| | \|\|\|\|\|\|\|\|\|\|\|\|\|\|\|\|\|\|\|\|\|\|\|\|\|\|\|\|\|\|\|\|\|\|\|\|\|\|\|\|\|\|\|\|\|\|\|\|\|\| | |
| 2001 | RGTARSPSLSRLLCRQEAVHTDSLEGKIDSPRDTLDPAEPGEKTPVRPVT | 2050 |
| | . . . . . | |
| 2045 | QGGSLQSPPRSPRPASVRTRKHTFGQRCVSSRPAAPGGEEAEASDPADEE | 2094 |
| | \|\|\|\|\|\|\|\|\|\|\|\|\|\|\|\|\|\|\|\|\|\|\|\|\|\|\|\|\|\|\|\|\|\|\|\|\|\|\|\|\|\|\|\|\|\|\|\|\|\| | |
| 2051 | QGGSLQSPPRSPRPASVRTRKHTFGQRCVSSRPAAPGGEEAEASDPADEE | 2100 |
| | . . . . . | |
| 2095 | VSHITSSACPWQPTAEPHGPEASPVAGGERDLRRLYSVDAQGFLDKPGRA | 2144 |
| | \|\|\|\|\|\|\|\|\|\|\|\|\|\|\|\|\|\|\|\|\|\|\|\|\|\|\|\|\|\|\|\|\|\|\|\|\|\|\|\|\|\|\|\|\|\|\|\|\|\| | |
| 2101 | VSHITSSACPWQPTAEPHGPEASPVAGGERDLRRLYSVDAQGFLDKPGRA | 2150 |
| | . . . . . | |
| 2145 | DEQWRPSAELGSGEPGEAKAWGPEAEPALGARRKKKMSPPCISVEPPAED | 2194 |
| | \|\|\|\|\|\|\|\|\|\|\|\|\|\|\|\|\|\|\|\|\|\|\|\|\|\|\|\|\|\|\|\|\|\|\|\|\|\|\|\|\|\|\|\|\|\|\|\|\|\| | |
| 2151 | DEQWRPSAELGSGEPGEAKAWGPEAEPALGARRKKKMSPPCISVEPPAED | 2200 |
| | . . . . . | |
| 2195 | EGSARPSAAEGGSTTLRRRTPSCEATPHRDSLEPTEGSGAGGDPAAKGER | 2244 |
| | \|\|\|\|\|\|\|\|\|\|\|\|\|\|\|\|\|\|\|\|\|\|\|\|\|\|\|\|\|\|\|\|\|\|\|\|\|\|\|\|\|\|\|\|\|\|\|\|\|\| | |
| 2201 | EGSARPSAAEGGSTTLRRRTPSCEATPHRDSLEPTEGSGAGGDPAAKGER | 2250 |
| | . . . . . | |
| 2245 | WGQASCRAEHLTVPSFAFEPLDLGVPSGDPFLDGSHSVTPESRASSSGAI | 2294 |
| | \|\|\|\|\|\|\|\|\|\|\|\|\|\|\|\|\|\|\|\|\|\|\|\|\|\|\|\|\|\|\|\|\|\|\|\|\|\|\|\|\|\|\|\|\|\|\|\|\|\| | |
| 2251 | WGQASCRAEHLTVPSFAFEPLDLGVPSGDPFLDGSHSVTPESRASSSGAI | 2300 |
| | . . . . . | |
| 2295 | VPLEPPESEPPMPVGDPPEKRRGLYLTVPQCPLEKPGSPSATPAPGGGAD | 2344 |
| | \|\|\|\|\|\|\|\|\|\|\|\|\|\|\|\|\|\|\|\|\|\|\|\|\|\|\|\|\|\|\|\|\|\|\|\|\|\|\|\|\|\|\|\|\|\|\|\|\|\| | |
| 2301 | VPLEPPESEPPMPVGDPPEKRRGLYLTVPQCPLEKPGSPSATPAPGGGAD | 2350 |
| 2345 | DPV | 2347 |
| \|\|\| | | |
| 2351 | DPV | 2353 |

### EXAMPLE 12

[0311] This Example relates to the variant T80376_P3 (SEQ ID NO:2; the nucleic acid sequence is given by SEQ ID NO:24), which is a variant alpha 1 subunit according to the present invention, and more specifically, is a splice variant of the known protein CCAH_HUMAN, which is encoded by the CACNA1H gene. This alpha subunit is the alpha 1H subunit, which forms the voltage-dependent T-type calcium channel. It is also known as alpha subunit Cav3.2. The known protein is described with regard to Example 11 above.

[0312] The structure of the splice variant according to the present invention features a skipped exon, as compared to the known protein sequence. An alignment is provided at the end of this section, while the comparison between the two sequences is described below.

[0313] According to preferred embodiments of the present invention, there is provided an isolated chimeric polypeptide encoding for T80376_P3, comprising a first amino acid sequence being at least 90% homologous to (SEQ ID NO: 120) MHLFGCKFSLKTDTGDTVPDRKNFDSLLWAIVTVFQILTQEDWNVVLYNGMASTSSWAALYFVALMTFGNYVLFNLLVAILVEGFQAEGDANRSDTDEDKTSVHFEEDFHKLRELQTTELKMCSLAVTPNGHLEGRGSLSPPLIMCTAATPMPTPKSSPFLDAAPSLPDSRRGSSSSGDPPLGDQKPPASLRSSPCAPWGPSGAWSSRRSSWSSLGRAPSLKRRGQCGERESLLSGEGKGSTDDEAEDGRAAPGPRATPLRRAESLDPRPLRPAALPPTKCRDRDGQVVALPSDFFLRIDSHREDAAELDDDSEDSCCLRLHKVLEPYKPQWCRSREAWALYLFSPQNRFRVSCQKVITHKMFDHVVLVFIFLNCVTIALERPDIDPGSTERVFLSVSNYIFTAIFVAEMMVKVVALGLLSGEHAYLQSSWNLLDGLLVLVSLVDIVVAMASAGGAKILGVLRVLRLLRTLRPLRVISRAPGLKLVVETLISSLRPIGNIVLICCAFFIIFGILGVQLFKGKFYYCEGPDTRNISTKAQCRAAHYRWVRRKYNFDNLGQALMSLFVLSSKDGWVNIMYDGLDAVGVDQQPVQNHNPWMLLYFISFLLIVSFFVLNMFVGVVVENFHKCRQHQEAEEARRREEKRLRRLERRRR corresponding to amino acids 934-1586 of CCAH_HUMAN, which also corresponds to amino acids 1-653 of T80376_P3, a second amino acid sequence bridging amino acid sequence comprising of K, and a third amino acid sequence being at least 90% homologous to (SEQ ID NO: 121) AQRRPYYADYSPTRRSIHSLCTSHYLDLFITFIICVNVITMSMEHYNQPKSLDEALKYCNYVFTIVFVFEAALKLVAFGFRRFFKDRWNQLDLAIVLLSLMGITLEEIEMSAALPINPTIIRIMRVLRIARVLKLLKMATGMRALLDTVVQALPQVGNLGLLFMLLFFIYAALGVELFGRLECSEDNPCEGLSRHATFSNFGMAFLTLFRVSTGDNWNGIMKDTLRECSREDKHCLSYLPALSPVYFVTFVLVAQFVLVNVVVAVLMKHLEESNKEAREDAELDAEIELEMAQGPGSARRVDADRPPLPQESPGARDAPNLVARKVSVSRMLSLPNDSYMFRPVVPASAPHPRPLQEVEMETYGAGTPLGSVASVHSPPAESCASLQIPLAVSSPARSGEPLHALSPRGTARSPSLSRLLCRQEAVHTDSLEGKIDSPRDTLDPAEPGEKTPVRPVTQGGSLQSPPRSPRPASVRTRKHTFGQRCVSSRPAAPGGEEAEASDPADEEVSHITSSACPWQPTAEPHGPEASPVAGGERDLRRLYSVDAQGFLDKPGRADEQWRPSAELGSGEPGEAKAWGPEAEPALGARRKKKMSPPCISVEPPAEDEGSARPSAAEGGSTTLRRRTPSCEATPHRDSLEPTEGSGAGGDPAAKGERWGQASCRAEHLTVPSFAFEPLDLGVPSGDPFLDGSHSVTPESRASSSGAIVPLEPPESEPPMPVGDPPEKRRGLYLTVPQCPLEKPGSPSATPAPGGGADDPV corresponding to amino acids 1594-2353 of CCAH_HUMAN, which also corresponds to amino acids 655-1414 of T80376_P3, wherein said first amino acid sequence, second amino acid sequence and third amino acid sequence are contiguous and in a sequential order.

[0314] According to preferred embodiments of the present invention, there is provided an isolated polypeptide encoding for an edge portion of T80376_P3, comprising a polypeptide having a length “n”, wherein n is at least about 10 amino acids in length, optionally at least about 20 amino acids in length, preferably at least about 30 amino acids in length, more preferably at least about 40 amino acids in length and most preferably at least about 50 amino acids in length, wherein at least three amino acids comprise RKA having a structure as follows (numbering according to T80376_P3): a sequence starting from any of amino acid numbers 653−x to 653; and ending at any of amino acid numbers 655+((n−2)−x), in which x varies from 0 to n−2.

[0315] Domains affected by alternative splicing include the cytoplasmic N-terminus region of the protein; the S1 transmembrane domain of domain I; the extracellular loop between S1 and S2 transmembrane domains of domain I; the S2 transmembrane domain of domain I; the extracellular loop between S2 and S3 transmembrane domains of domain I; the S3 transmembrane domain of domain I; the extracellular loop between S3 and S4 transmembrane domains of domain I; the S4 transmembrane domain of domain I; the extracellular loop between S4 and S5 transmembrane domains of domain I; the S5 transmembrane domain of domain I; the pore loop region between S5 and S6 transmembrane domains of domain I; the S6 transmembrane domain of domain I; the cytoplasmic loop between domain I and domain II; the S1 transmembrane domain of domain II; the extracellular loop between S1 and S2 transmembrane domains of domain II; the S2 transmembrane domain of domain II; the extracellular loop between S2 and S3 transmembrane domains of domain II; the S3 transmembrane domain of domain II; the extracellular loop between S3 and S4 transmembrane domains of domain II; the S4 transmembrane domain of domain II; the extracellular loop between S4 and S5 transmembrane domains of domain II; the S5 transmembrane domain of domain II; the cytoplasmic loop between domain III and domain IV.

[0316] Certain Effects of These Changes are Described with Regard to Example 9.

[0317] The domain I-II interlinker (cytoplasmic loop) is important for G-protein modulation, inactivation and possibly beta subunit interaction.

[0318] From the above description of the effect of changes to the cytoplasmic loop between domain III and domain IV of this variant, it is expected that the variant will have a right shift of activation and inactivation and slowing of activation kinetics or a left shift of inactivation and accelerated activation kinetics.

[0319] From the above description of the effect of changes to the cytoplasmic loop between domain I and domain II of this variant, it is expected that the variant will influence the G-protein modulation, inactivation and possibly beta subunit interaction.

| | . . . . . | |
|---|---|---|
| 1 | MHLFGCKFSLKTDTGDTVPDRKNFDSLLWAIVTVFQILTQEDWNVVLYNG | 50 |
| | \|\|\|\|\|\|\|\|\|\|\|\|\|\|\|\|\|\|\|\|\|\|\|\|\|\|\|\|\|\|\|\|\|\|\|\|\|\|\|\|\|\|\|\|\|\|\|\|\|\| | |
| 934 | MHLFGCKFSLKTDTGDTVPDRKNFDSLLWAIVTVFQILTQEDWNVVLYNG | 983 |
| | . . . . . | |
| 51 | MASTSSWAALYFVALMTFGNYVLFNLLVAILVEGFQAEGDANRSDTDEDK | 100 |
| | \|\|\|\|\|\|\|\|\|\|\|\|\|\|\|\|\|\|\|\|\|\|\|\|\|\|\|\|\|\|\|\|\|\|\|\|\|\|\|\|\|\|\|\|\|\|\|\|\|\| | |
| 984 | MASTSSWAALYFVALMTFGNYVLFNLLVAILVEGFQAEGDANRSDTDEDK | 1033 |
| | . . . . . | |
| 101 | TSVHFEEDFHKLRELQTTELKMCSLAVTPNGHLEGRGSLSPPLIMCTAAT | 150 |
| | \|\|\|\|\|\|\|\|\|\|\|\|\|\|\|\|\|\|\|\|\|\|\|\|\|\|\|\|\|\|\|\|\|\|\|\|\|\|\|\|\|\|\|\|\|\|\|\|\|\| | |
| 1034 | TSVHFEEDFHKLRELQTTELKMCSLAVTPNGHLEGRGSLSPPLIMCTAAT | 1083 |
| | . . . . . | |
| 151 | PMPTPKSSPFLDAAPSLPDSRRGSSSSGDPPLGDQKPPASLRSSPCAPWG | 200 |
| | \|\|\|\|\|\|\|\|\|\|\|\|\|\|\|\|\|\|\|\|\|\|\|\|\|\|\|\|\|\|\|\|\|\|\|\|\|\|\|\|\|\|\|\|\|\|\|\|\|\| | |
| 1084 | PMPTPKSSPFLDAAPSLPDSRRGSSSSGDPPLGDQKPPASLRSSPCAPWG | 1133 |
| | . . . . . | |
| 201 | PSGAWSSRRSSWSSLGRAPSLKRRGQCGERESLLSGEGKGSTDDEAEDGR | 250 |
| | \|\|\|\|\|\|\|\|\|\|\|\|\|\|\|\|\|\|\|\|\|\|\|\|\|\|\|\|\|\|\|\|\|\|\|\|\|\|\|\|\|\|\|\|\|\|\|\|\|\| | |
| 1134 | PSGAWSSRRSSWSSLGRAPSLKRRGQCGERESLLSGEGKGSTDDEAEDGR | 1183 |
| | . . . . . | |
| 251 | AAPGPRATPLRRAESLDPRPLRPAALPPTKCRDRDGQVVALPSDFFLRID | 300 |
| | \|\|\|\|\|\|\|\|\|\|\|\|\|\|\|\|\|\|\|\|\|\|\|\|\|\|\|\|\|\|\|\|\|\|\|\|\|\|\|\|\|\|\|\|\|\|\|\|\|\| | |
| 1184 | AAPGPRATPLRRAESLDPRPLRPAALPPTKCRDRDGQVVALPSDFFLRID | 1233 |
| | . . . . . | |
| 301 | SHREDAAELDDDSEDSCCLRLHKVLEPYKPQWCRSREAWALYLFSPQNRF | 350 |
| | \|\|\|\|\|\|\|\|\|\|\|\|\|\|\|\|\|\|\|\|\|\|\|\|\|\|\|\|\|\|\|\|\|\|\|\|\|\|\|\|\|\|\|\|\|\|\|\|\|\| | |
| 1234 | SHREDAAELDDDSEDSCCLRLHKVLEPYKPQWCRSREAWALYLFSPQNRF | 1283 |
| | . . . . . | |
| 351 | RVSCQKVITHKMFDHVVLVFIFLNCVTIALERPDIDPGSTERVFLSVSNY | 400 |
| | \|\|\|\|\|\|\|\|\|\|\|\|\|\|\|\|\|\|\|\|\|\|\|\|\|\|\|\|\|\|\|\|\|\|\|\|\|\|\|\|\|\|\|\|\|\|\|\|\|\| | |
| 1284 | RVSCQKVITHKMFDHVVLVFIFLNCVTIALERPDIDPGSTERVFLSVSNY | 1333 |
| | . . . . . | |
| 401 | IFTAIFVAEMMVKVVALGLLSGEHAYLQSSWNLLDGLLVLVSLVDIVVAM | 450 |
| | \|\|\|\|\|\|\|\|\|\|\|\|\|\|\|\|\|\|\|\|\|\|\|\|\|\|\|\|\|\|\|\|\|\|\|\|\|\|\|\|\|\|\|\|\|\|\|\|\|\| | |
| 1334 | IFTAIFVAEMMVKVVALGLLSGEHAYLQSSWNLLDGLLVLVSLVDIVVAM | 1383 |
| | . . . . . | |
| 451 | ASAGGAKILGVLRVLRLLRTLRPLRVISRAPGLKLVVETLISSLRPIGNI | 500 |
| | \|\|\|\|\|\|\|\|\|\|\|\|\|\|\|\|\|\|\|\|\|\|\|\|\|\|\|\|\|\|\|\|\|\|\|\|\|\|\|\|\|\|\|\|\|\|\|\|\|\| | |
| 1384 | ASAGGAKILGVLRVLRLLRTLRPLRVISRAPGLKLVVETLISSLRPIGNI | 1433 |
| | . . . . . | |
| 501 | VLICCAFFIIFGILGVQLFKGKFYYCEGPDTRNISTKAQCRAAHYRWVRR | 550 |
| | \|\|\|\|\|\|\|\|\|\|\|\|\|\|\|\|\|\|\|\|\|\|\|\|\|\|\|\|\|\|\|\|\|\|\|\|\|\|\|\|\|\|\|\|\|\|\|\|\|\| | |
| 1434 | VLICCAFFIIFGILGVQLFKGKFYYCEGPDTRNISTKAQCRAAHYRWVRR | 1483 |
| | . . . . . | |
| 551 | KYNFDNLGQALMSLFVLSSKDGWVNIMYDGLDAVGVDQQPVQNHNPWMLL | 600 |
| | \|\|\|\|\|\|\|\|\|\|\|\|\|\|\|\|\|\|\|\|\|\|\|\|\|\|\|\|\|\|\|\|\|\|\|\|\|\|\|\|\|\|\|\|\|\|\|\|\|\| | |
| 1484 | KYNFDNLGQALMSLFVLSSKDGWVNIMYDGLDAVGVDQQPVQNHNPWMLL | 1533 |
| | . . . . . | |
| 601 | YFISFLLIVSFFVLNMFVGVVVENFHKCRQHQEAEEARRREEKRLRRLER | 650 |
| | \|\|\|\|\|\|\|\|\|\|\|\|\|\|\|\|\|\|\|\|\|\|\|\|\|\|\|\|\|\|\|\|\|\|\|\|\|\|\|\|\|\|\|\|\|\|\|\|\|\| | |
| 1534 | YFISFLLIVSFFVLNMFVGVVVENFHKCRQHQEAEEARRREEKRLRRLER | 1583 |
| | . . . . . | |
| 651 | RRR......KAQRRPYYADYSPTRRSIHSLCTSHYLDLFITFIICVNVIT | 694 |
| | \|\|\| : \|\|\|\|\|\|\|\|\|\|\|\|\|\|\|\|\|\|\|\|\|\|\|\|\|\|\|\|\|\|\|\|\|\|\|\|\|\|\|\| | |
| 1584 | RRRSTFPSPEAQRRPYYADYSPTRRSIHSLCTSHYLDLFITFIICVNVIT | 1633 |
| | . . . . . | |
| 695 | MSMEHYNQPKSLDEALKYCNYVFTIVFVFEAALKLVAFGFRRFFKDRWNQ | 744 |
| | \|\|\|\|\|\|\|\|\|\|\|\|\|\|\|\|\|\|\|\|\|\|\|\|\|\|\|\|\|\|\|\|\|\|\|\|\|\|\|\|\|\|\|\|\|\|\|\|\|\| | |
| 1634 | MSMEHYNQPKSLDEALKYCNYVFTIVFVFEAALKLVAFGFRRFFKDRWNQ | 1683 |
| | . . . . . | |
| 745 | LDLAIVLLSLMGITLEEIEMSAALPINPTIIRIMRVLRIARVLKLLKMAT | 794 |
| | \|\|\|\|\|\|\|\|\|\|\|\|\|\|\|\|\|\|\|\|\|\|\|\|\|\|\|\|\|\|\|\|\|\|\|\|\|\|\|\|\|\|\|\|\|\|\|\|\|\| | |
| 1684 | LDLAIVLLSLMGITLEEIEMSAALPINPTIIRIMRVLRIARVLKLLKMAT | 1733 |
| | . . . . . | |
| 795 | GMRALLDTVVQALPQVGNLGLLFMLLFFIYAALGVELFGRLECSEDNPCE | 844 |
| | \|\|\|\|\|\|\|\|\|\|\|\|\|\|\|\|\|\|\|\|\|\|\|\|\|\|\|\|\|\|\|\|\|\|\|\|\|\|\|\|\|\|\|\|\|\|\|\|\|\| | |
| 1734 | GMRALLDTVVQALPQVGNLGLLFMLLFFIYAALGVELFGRLECSEDNPCE | 1783 |
| | . . . . . | |
| 845 | GLSRHATFSNFGMAFLTLFRVSTGDNWNGIMKDTLRECSREDKHCLSYLP | 894 |
| | \|\|\|\|\|\|\|\|\|\|\|\|\|\|\|\|\|\|\|\|\|\|\|\|\|\|\|\|\|\|\|\|\|\|\|\|\|\|\|\|\|\|\|\|\|\|\|\|\|\| | |
| 1784 | GLSRHATFSNFGMAFLTLFRVSTGDNWNGIMKDTLRECSREDKHCLSYLP | 1833 |
| | . . . . . | |
| 895 | ALSPVYFVTFVLVAQFVLVNVVVAVLMKHLEESNKEAREDAELDAEIELE | 944 |
| | \|\|\|\|\|\|\|\|\|\|\|\|\|\|\|\|\|\|\|\|\|\|\|\|\|\|\|\|\|\|\|\|\|\|\|\|\|\|\|\|\|\|\|\|\|\|\|\|\|\| | |
| 1834 | ALSPVYFVTFVLVAQFVLVNVVVAVLMKHLEESNKEAREDAELDAEIELE | 1883 |
| | . . . . . | |
| 945 | MAQGPGSARRVDADRPPLPQESPGARDAPNLVARKVSVSRMLSLPNDSYM | 994 |
| | \|\|\|\|\|\|\|\|\|\|\|\|\|\|\|\|\|\|\|\|\|\|\|\|\|\|\|\|\|\|\|\|\|\|\|\|\|\|\|\|\|\|\|\|\|\|\|\|\|\| | |
| 1884 | MAQGPGSARRVDADRPPLPQESPGARDAPNLVARKVSVSRMLSLPNDSYM | 1933 |
| | . . . . . | |
| 995 | FRPVVPASAPHPRPLQEVEMETYGAGTPLGSVASVHSPPAESCASLQIPL | 1044 |
| | \|\|\|\|\|\|\|\|\|\|\|\|\|\|\|\|\|\|\|\|\|\|\|\|\|\|\|\|\|\|\|\|\|\|\|\|\|\|\|\|\|\|\|\|\|\|\|\|\|\| | |
| 1934 | FRPVVPASAPHPRPLQEVEMETYGAGTPLGSVASVHSPPAESCASLQIPL | 1983 |
| | . . . . . | |
| 1045 | AVSSPARSGEPLHALSPRGTARSPSLSRLLCRQEAVHTDSLEGKIDSPRD | 1094 |
| | \|\|\|\|\|\|\|\|\|\|\|\|\|\|\|\|\|\|\|\|\|\|\|\|\|\|\|\|\|\|\|\|\|\|\|\|\|\|\|\|\|\|\|\|\|\|\|\|\|\| | |
| 1984 | AVSSPARSGEPLHALSPRGTARSPSLSRLLCRQEAVHTDSLEGKIDSPRD | 2033 |
| | . . . . . | |
| 1095 | TLDPAEPGEKTPVRPVTQGGSLQSPPRSPRPASVRTRKHTFGQRCVSSRP | 1144 |
| | \|\|\|\|\|\|\|\|\|\|\|\|\|\|\|\|\|\|\|\|\|\|\|\|\|\|\|\|\|\|\|\|\|\|\|\|\|\|\|\|\|\|\|\|\|\|\|\|\|\| | |
| 2034 | TLDPAEPGEKTPVRPVTQGGSLQSPPRSPRPASVRTRKHTFGQRCVSSRP | 2083 |
| | . . . . . | |
| 1145 | AAPGGEEAEASDPADEEVSHITSSACPWQPTAEPHGPEASPVAGGERDLR | 1194 |
| | \|\|\|\|\|\|\|\|\|\|\|\|\|\|\|\|\|\|\|\|\|\|\|\|\|\|\|\|\|\|\|\|\|\|\|\|\|\|\|\|\|\|\|\|\|\|\|\|\|\| | |
| 2084 | AAPGGEEAEASDPADEEVSHITSSACPWQPTAEPHGPEASPVAGGERDLR | 2133 |
| | . . . . . | |
| 1195 | RLYSVDAQGFLDKPGRADEQWRPSAELGSGEPGEAKAWGPEAEPALGARR | 1244 |
| | \|\|\|\|\|\|\|\|\|\|\|\|\|\|\|\|\|\|\|\|\|\|\|\|\|\|\|\|\|\|\|\|\|\|\|\|\|\|\|\|\|\|\|\|\|\|\|\|\|\| | |
| 2134 | RLYSVDAQGFLDKPGRADEQWRPSAELGSGEPGEAKAWGPEAEPALGARR | 2183 |
| | . . . . . | |
| 1245 | KKKMSPPCISVEPPAEDEGSARPSAAEGGSTTLRRRTPSCEATPHRDSLE | 1294 |
| | \|\|\|\|\|\|\|\|\|\|\|\|\|\|\|\|\|\|\|\|\|\|\|\|\|\|\|\|\|\|\|\|\|\|\|\|\|\|\|\|\|\|\|\|\|\|\|\|\|\| | |
| 2184 | KKKMSPPCISVEPPAEDEGSARPSAAEGGSTTLRRRTPSCEATPHRDSLE | 2233 |
| | . . . . . | |
| 1295 | PTEGSGAGGSPAAKGERWGQASCRAEHLTVPSFAFEPLDLGVPSGDPFLD | 1344 |
| | \|\|\|\|\|\|\|\|\|\|\|\|\|\|\|\|\|\|\|\|\|\|\|\|\|\|\|\|\|\|\|\|\|\|\|\|\|\|\|\|\|\|\|\|\|\|\|\|\|\| | |
| 2234 | PTEGSGAGGDPAAKGERWGQASCRAEHLTVPSFAFEPLDLGVPSGDPFLD | 2283 |
| | . . . . . | |
| 1345 | GSHSVTPESRASSSGAIVPLEPPESEPPMPVGDPPEKRRGLYLTVPQCPL | 1394 |
| | \|\|\|\|\|\|\|\|\|\|\|\|\|\|\|\|\|\|\|\|\|\|\|\|\|\|\|\|\|\|\|\|\|\|\|\|\|\|\|\|\|\|\|\|\|\|\|\|\|\| | |
| 2284 | GSHSVTPESRASSSGAIVPLEPPESEPPMPVGDPPEKRRGLYLTVPQCPL | 2333 |
| | . . | |
| 1395 | EKPGSPSATPAPGGGADDPV | 1414 |
| | \|\|\|\|\|\|\|\|\|\|\|\|\|\|\|\|\|\|\|\| | |
| 2334 | EKPGSPSATPAPGGGADDPV | 2353 |

### EXAMPLE 13

[0320] This Example relates to the variant T80376_P4 (SEQ ID NO:3; the nucleic acid sequence is given by SEQ ID NO:25), which is a variant alpha 1 subunit according to the present invention, and more specifically, is a splice variant of the known protein CCAH_HUMAN, which is encoded by the CACNA1H gene. This alpha subunit is the alpha 1H subunit, which forms the voltage-dependent T-type calcium channel. It is also known as alpha subunit Cav3.2. The known protein is described with regard to Example 11 above.

[0321] The structure of the splice variant according to the present invention features a unique tail, as compared to the known protein sequence. An alignment is provided at the end of this section, while the comparison between the two sequences is described below.

[0322] According to preferred embodiments of the present invention, there is provided an isolated chimeric polypeptide encoding for T80376_P4, comprising a first amino acid sequence being at least 90% homologous to (SEQ ID NO: 123) MTEGARAADEVRVPLGAPPPGPAALVGASPESPGAPGREAERGSELGVSPSESPAAERGAELGADEEQRVPYPALAATVFFCLGQTTRPRSWCLRLVCNPWFEHVSMLVIMLNCVTLGMFRPCEDVECGSERCNILEAFDAFIFAFFAVEMVIKMVALGLFGQKCYLGDTWNRLDFFIVVAGMMEYSLDGHNVSLSAIRTVRVLRPLRAINRVPSMRILVTLLLDTLPMLGNVLLLCFFVFFIFGIVGVQLWAGLLRNRCFLDSAFVR corresponding to amino acids 1-268 of CCAH_HUMAN, which also corresponds to amino acids 1-268 of T80376_P4, and a second amino acid sequence being at least 70%, optionally at least 80%, preferably at least 85%, more preferably at least 90% and most preferably at least 95% homologous to a polypeptide having the sequence (SEQ ID NO: 124) CPGPTPVRPLPRWPCPPCR corresponding to amino acids 269-287 of T80376_P4, wherein said first amino acid sequence and second amino acid sequence are contiguous and in a sequential order.

[0323] According to preferred embodiments of the present invention, there is provided an isolated polypeptide encoding for a tail of T80376_P4, comprising a polypeptide being at least 70%, optionally at least about 80%, preferably at least about 85%, more preferably at least about 90% and most preferably at least about 95% homologous to the sequence (SEQ ID NO: 125) CPGPTPVRPLPRWPCPPCR in T80376_P4.

[0324] Domains affected by alternative splicing include the pore loop region between S5 and S6 transmembrane domains of domain I; the S6 transmembrane domain of domain I; the cytoplasmic loop between domain I and domain II; the S1 transmembrane domain of domain II; the extracellular loop between S1 and S2 transmembrane domains of domain II; the S2 transmembrane domain of domain II; the extracellular loop between S2 and S3 transmembrane domains of domain II; the S3 transmembrane domain of domain II; the extracellular loop between S3 and S4 transmembrane domains of domain II; the S4 transmembrane domain of domain II; the extracellular loop between S4 and S5 transmembrane domains of domain II; tThe S5 transmembrane domain of domain II; the pore loop region between S5 and S6 transmembrane domains of domain II; the S6 transmembrane domain of domain II; the cytoplasmic loop between domain II and domain III; the S1 transmembrane domain of domain III; the extracellular loop between S1 and S2 transmembrane domains of domain III; the S2 transmembrane domain of domain III; the extracellular loop between S2 and S3 transmembrane domains of domain III; the S3 transmembrane domain of domain III; the extracellular loop between S3 and S4 transmembrane domains of domain III; the S4 transmembrane domain of domain III; the extracellular loop between S4 and S5 transmembrane domains of domain III; the S5 transmembrane domain of domain III; the pore loop region between S5 and S6 transmembrane domains of domain III; the S6 transmembrane domain of domain III; the cytoplasmic loop between domain III and domain IV; the S1 transmembrane domain of domain IV; the extracellular loop between S1 and S2 transmembrane domains of domain IV; the S2 transmembrane domain of domain IV; the extracellular loop between S2 and S3 transmembrane domains of domain IV; the S3 transmembrane domain of domain IV; the extracellular loop between S3 and S4 transmembrane domains of domain IV; the S4 transmembrane domain of domain IV; the extracellular loop between S4 and S5 transmembrane domains of domain IV; the S5 transmembrane domain of domain IV; the pore loop region between S5 and S6 transmembrane domains of domain IV; the S6 transmembrane domain of domain IV; the cytoplasmic C-terminus region of the protein.

[0325] The effects of certain of these changes were explained in Examples 2, 9 and 12 above.

[0326] From the above description of the effect of changes to the cytoplasmic loop between domain III and domain IV of this variant, it is expected that the variant will have a right shift of activation and inactivation and slowing of activation kinetics or a left shift of inactivation and accelerated activation kinetics.

[0327] From the above description of the effect of changes to the cytoplasmic loop between domain I and domain II of this variant, it is expected that the variant will influence the G-protein modulation, inactivation and possibly beta subunit interaction.

[0328] From the above description of the effect of changes to the C-terminus domain of this variant, it is expected that the variant will influence neuronal function in such a manner that the slowly inactivating variants would be liable to sustain firing patterns.

Sequence name: CCAH_HUMAN

documentation:

of T80376_P4 (residues 1-277 of SEQ ID NO: 3)x CCAH_HUMAN (SEQ ID NO: 126) . . .

seqment 1/1:

[0329] Quality: 2617.00

Escore: 0

Matching length: 277 Total

length: 277

Matching Percent Similarity: 98.19 Matching Percent

Identity: 97.83

Total Percent Similarity: 98.19 Total Percent

Identity: 97.83

[0330] Gaps: 0

| | . . . . . | |
|---|---|---|
| 1 | MTEGARAADEVRVPLGAPPPGPAALVGASPESPGAPGREAERGSELGVSP | 50 |
| | \|\|\|\|\|\|\|\|\|\|\|\|\|\|\|\|\|\|\|\|\|\|\|\|\|\|\|\|\|\|\|\|\|\|\|\|\|\|\|\|\|\|\|\|\|\|\|\|\|\| | |
| 1 | MTEGARAADEVRVPLGAPPPGPAALVGASPESPGAPGREAERGSELGVSP | 50 |
| | . . . . . | |
| 51 | SESPAAERGAELGADEEQRVPYPALAATVFFCLGQTTRPRSWCLRLVCNP | 100 |
| | \|\|\|\|\|\|\|\|\|\|\|\|\|\|\|\|\|\|\|\|\|\|\|\|\|\|\|\|\|\|\|\|\|\|\|\|\|\|\|\|\|\|\|\|\|\|\|\|\|\| | |
| 51 | SESPAAERGAELGADEEQRVPYPALAATVFFCLGQTTRPRSWCLRLVCNP | 100 |
| | . . . . . | |
| 101 | WFEHVSMLVIMLNCVTLGMFRPCEDVECGSERCNILEAFDAFIFAFFAVE | 150 |
| | \|\|\|\|\|\|\|\|\|\|\|\|\|\|\|\|\|\|\|\|\|\|\|\|\|\|\|\|\|\|\|\|\|\|\|\|\|\|\|\|\|\|\|\|\|\|\|\|\|\| | |
| 101 | WFEHVSMLVIMLNCVTLGMFRPCEDVECGSERCNILEAFDAFIFAFFAVE | 150 |
| | . . . . . | |
| 151 | MVIKMVALGLFGQKCYLGDTWNRLDFFIVVAGMMEYSLDGHNVSLSAIRT | 200 |
| | \|\|\|\|\|\|\|\|\|\|\|\|\|\|\|\|\|\|\|\|\|\|\|\|\|\|\|\|\|\|\|\|\|\|\|\|\|\|\|\|\|\|\|\|\|\|\|\|\|\| | |
| 151 | MVIKMVALGLFGQKCYLGDTWNRLDFFIVVAGMMEYSLDGHNVSLSAIRT | 200 |
| | . . . . . | |
| 201 | VRVLRPLRAINRVPSMRILVTLLLDTLPMLGNVLLLCFFVFFIFGIVGVQ | 250 |
| | \|\|\|\|\|\|\|\|\|\|\|\|\|\|\|\|\|\|\|\|\|\|\|\|\|\|\|\|\|\|\|\|\|\|\|\|\|\|\|\|\|\|\|\|\|\|\|\|\|\| | |
| 201 | VRVLRPLRAINRVPSMRILVTLLLDTLPMLGNVLLLCFFVFFIFGIVGVQ | 250 |
| | . . | |
| 251 | LWAGLLRNRCFLDSAFVRCPGPTPVRP | 277 |
| | \|\|\|\|\|\|\|\|\|\|\|\|\|\|\|\|\|\| \| :\|\| | |
| 251 | LWAGLLRNRCFLDSAFVRNNNLTFLRP | 277 |

### EXAMPLE 14

[0331] This Example relates to the variant HUMLVDCCB_P19 (SEQ ID NO:4; the nucleic acid sequence is given by SEQ ID NO:26), which is a variant alpha 1 subunit according to the present invention, and more specifically, is a splice variant of the known protein CCAC_HUMAN, which is encoded by the CACNA1C gene. This alpha subunit is the alpha 1C subunit, which forms the voltage-dependent L-type calcium channel. This subunit is also called the alpha subunit Cav1.2. This subunit results in L-type calcium channels as described above. Calcium channels containing the alpha-1C subunit play an important role in excitation-contraction coupling in the heart. The various isoforms display marked differences in the sensitivity to DHP compounds.

[0332] This subunit is expressed in heart, ovary, pancreatic beta-cells and in the brain.

[0333] The structure is as follows. Each of the four internal repeats contains five hydrophobic transmembrane segments (S1, S2, S3, S5, S6) and one positively charged transmembrane segment (S4). S4 segments probably represent the voltage-sensor and are characterized by a series of positively charged amino acids at every third position.

[0334] It is predicted that phosphorylation by PKA activates the channel.

[0335] The structure of the splice variant according to the present invention features a unique tail, a unique insertion and a skipped exon, as compared to the known protein sequence. An alignment is provided at the end of this section, while the comparison between the two sequences is described below.

[0336] According to preferred embodiments of the present invention, there is provided an isolated chimeric polypeptide encoding for HUMLVDCCB_P19, comprising a first amino acid sequence being at least 90% homologous to (SEQ ID NO: 127) MVNENTRMYIPEENHQGSNYGSPRPAHANMNANAAAGLAPEHIPTPGAALSWQAAIDAARQAKLMGSAGNATISTVSSTQRKRQQYGKPKKQGSTTATRPPRALLCLTLKNPIRRACISIVEWKPFEIIILLTIFANCVALAIYIPFPEDDSNATNSNLERVEYLFLIIFTVEAFLKVIAYGLLFHPNAYLRNGWNLLDFIIVVVGLFSAILEQATKADGANALGGKGAGFDVKALRAFRVLRPLRLVSGVPSLQVVLNSIIKAMVPLLHIALLVLFVIIIYAIIGLELFMGKMHKTCYNQEGIADVPAEDDPSPCALETGHGRQCQNGTVCKPGWDGPKHGITNFDNFAFAMLTVFQCITMEGWTDVLYWVNDAVGRDWPWIYFVTLIIIGSFFVLNLVLGVLSGEFSKEREKAKARGDFQKLREKQQLEEDLKGYLDWITQAEDIDPENEDEGMDEEKPRN corresponding to amino acids 1-463 of CCAC_HUMAN, which also corresponds to amino acids 1-463 of HUMLVDCCB_P19, a second amino acid sequence being at least 70%, optionally at least 80%, preferably at least 85%, more preferably at least 90% and most preferably at least 95% homologous to a polypeptide having the sequence (SEQ ID NO: 128) RGTPAGMLDQKKGKFAWFSHSTETHV corresponding to amino acids 464-489 of HUMLVDCCB_P19, a third amino acid sequence being at least 90% homologous to (SEQ ID NO: 129) SMPTSETESVNTENVAGGDIEGENCGARLAHRISKSKFSRYWRRWNRFCRRKCRAAVKSNVFYWLVIFLVFLNTLTIASEHYNQPNWLTEVQDTANKALLALFTAEMLLKMYSLGLQAYFVSLFNRFDCFVVCGGILETILVETKIMSPLGISVLRCVRLLRIFKITRYWNSLSNLVASLLNSVRSIASLLLLLFLFIIIFSLLGMQLFGGKFNFDEMQTRRSTFDNFPQSLLTVFQILTGEDWNSVMYDGIMAYGGPSFPGMLVCIYFIILFICGNYILLNVFLAIAVDNLADAESLTSAQKEEEEEKERKKLARTASPEKKQELVEKPAVGESKEEKIELKSITADGESPPATKINMDDLQPNENEDKSPYPNPETTGEEDEEEPEMPVGPRPRPLSELHLKEKAVPMPEASAFFIFSSNNRFRLQCHRIVNDTIFTNLILFFILLSSISLAAEDPVQHTSFRNH corresponding to amino acids 465-931 of CCAC_HUMAN, which also corresponds to amino acids 490-956 of HUMLVDCCB_P19, and a fourth amino acid sequence being at least 70%, optionally at least 80%, preferably at least 85%, more preferably at least 90% and most preferably at least 95% homologous to a polypeptide having the sequence (SEQ ID NO: 130) VCIACVFCTPSPWGCARPTASVADIIVQSGAQF corresponding to amino acids 957-989 of HUMLVDCCB_P19, wherein said first amino acid sequence, second amino acid sequence, third amino acid sequence and fourth amino acid sequence are contiguous and in a sequential order.

[0337] According to preferred embodiments of the present invention, there is provided an isolated polypeptide encoding for a unique insertion of HUMLVDCCB_P19, comprising an amino acid sequence being at least 70%, optionally at least about 80%, preferably at least about 85%, more preferably at least about 90% and most preferably at least about 95% homologous to the sequence encoding for (SEQ ID NO: 131) RGTPAGMLDQKKGKFAWFSHSTETHV, corresponding to HUMLVDCCB_P19.

[0338] According to preferred embodiments of the present invention, there is provided a bridge portion of HUMLVDCCB_P19, comprising a polypeptide having a length “n”, wherein n is at least about 10 amino acids in length, optionally at least about 20 amino acids in length, preferably at least about 30 amino acids in length, more preferably at least about 40 amino acids in length and most preferably at least about 50 amino acids in length, wherein at least two amino acids comprise NR, having a structure as follows (numbering according to HUMLVDCCB_P19): a sequence starting from any of amino acid numbers 463−x to 463; and ending at any of amino acid numbers 464+((n−2)−x), in which x varies from 0 to n−2.

[0339] According to preferred embodiments of the present invention, there is provided an isolated polypeptide encoding for a tail of HUMLVDCCB_P19, comprising a polypeptide being at least 70%, optionally at least about 80%, preferably at least about 85%, more preferably at least about 90% and most preferably at least about 95% homologous to the sequence (SEQ ID NO: 132) VCIACVFCTPSPWGCARPTASVADIIVQSGAQF in HUMLVDCCB_P19.

[0340] Domains affected by alternative splicing include the cytoplasmic loop between domain I and domain II; the extracellular loop between S1 and S2 transmembrane domains of domain III; the S2 transmembrane domain of domain III; the extracellular loop between S2 and S3 transmembrane domains of domain III; the S3 transmembrane domain of domain III; the extracellular loop between S3 and S4 transmembrane domains of domain III; the S4 transmembrane domain of domain III; the extracellular loop between S4 and S5 transmembrane domains of domain III.

[0341] The S5 transmembrane domain of domain III; the pore loop region between S5 and S6 transmembrane domains of domain III; the S6 transmembrane domain of domain III; the cytoplasmic loop between domain III and domain IV; the S1 transmembrane domain of domain IV; the extracellular loop between S1 and S2 transmembrane domains of domain IV; the S2 transmembrane domain of domain IV; the extracellular loop between S2 and S3 transmembrane domains of domain IV; the S3 transmembrane domain of domain IV; the extracellular loop between S3 and S4 transmembrane domains of domain IV; the S4 transmembrane domain of domain IV; the extracellular loop between S4 and S5 transmembrane domains of domain IV; the S5 transmembrane domain of domain IV; the pore loop region between S5 and S6 transmembrane domains of domain IV; the S6 transmembrane domain of domain IV; the cytoplasmic C-terminus region of the protein.

[0342] The effect on the cytoplasmic C-terminus region of the protein is expected to increase current amplitude and also calcium-dependent inactivation. For L-type channels, variants with shortened C-terminus in heart and skeletal muscle Cav1.2 and Cav1.1 have long been known but the truncation takes place at the protein level rather than being the result of RNA splicing. In the cardiac Cav1.2 channel, exons 40-43 show combinations of usage of an alternative splice donor site at the 3′ end of exon 40 or alternative splice acceptor sites at the 5′ ends of exons 42 and 43, inclusion of a supplementary cassette exon following exon 40 or skipping of exon 42.

[0343] The S2 transmembrane domain of domain III in cardiac L-type Cav1.2 channels is encoded by mutually exclusive exons 21 and 22, which differ by seven amino acids; this difference influences the voltage-dependent action of dihydropyridines.

[0344] The S3 transmembrane domain of domain IV in the same channels is encoded by mutually exclusive exons 31 and 32 which work as a developmentally regulated switch coinciding with major changes in excitation; and mutually exclusive exons 31a or 31b which influence dihydropyridine sensitivity.

[0345] From the above description of the effect of changes to the C-terminus domain of this variant, it is expected that the variant will have greater current amplitude from the known protein and a stronger calcium dependence of inactivation. It is also expected to modulate the Ca⁺²-dependent inactivation of the channel.

[0346] In addition, the changes in the S2 transmembrane domain of domain III might influence the voltage-dependent action of dihydropyridines, an important class of calcium channel blockers.

[0347] In addition, the changes in the S3 transmembrane domain of domain IV might influence dihydropyridine sensitivity and also may work as a developmentally regulated switch coinciding with major changes in excitation.

Sequence name: CCAC_HUMAN

documentation:

of: HUMLVDCCB_P19 (residues 1-957 of SEQ ID NO: 4)×CCAC_HUMAN (SEQ ID NO: 133) . . .

seqment 1/1:

[0348] Quality: 8982.00

Escore: 0

Matching length: 932 Total

length: 957

Matching Percent Similarity: 100.00 Matching Percent

Identity: 99.79

Total Percent Similarity: 97.39 Total Percent

Identity: 97.18

[0349] Gaps: 1

| | . . . . . | |
|---|---|---|
| 1 | MVNENTRMYIPEENHQGSNYGSPRPAHANMNANAAAGLAPEHIPTPGAAL | 50 |
| | \|\|\|\|\|\|\|\|\|\|\|\|\|\|\|\|\|\|\|\|\|\|\|\|\|\|\|\|\|\|\|\|\|\|\|\|\|\|\|\|\|\|\|\|\|\|\|\|\|\| | |
| 1 | MVNENTRMYIPEENHQGSNYGSPRPAHANMNANAAAGLAPEHIPTPGAAL | 50 |
| | . . . . . | |
| 51 | SWQAAIDAARQAKLMGSAGNATISTVSSTQRKRQQYGKPKKQGSTTATRP | 100 |
| | \|\|\|\|\|\|\|\|\|\|\|\|\|\|\|\|\|\|\|\|\|\|\|\|\|\|\|\|\|\|\|\|\|\|\|\|\|\|\|\|\|\|\|\|\|\|\|\|\|\| | |
| 51 | SWQAAIDAARQAKLMGSAGNATISTVSSTQRKRQQYGKPKKQGSTTATRP | 100 |
| | . . . . . | |
| 101 | PRALLCLTLKNPIRRACISIVEWKPFEIIILLTIFANCVALAIYIPFPED | 150 |
| | \|\|\|\|\|\|\|\|\|\|\|\|\|\|\|\|\|\|\|\|\|\|\|\|\|\|\|\|\|\|\|\|\|\|\|\|\|\|\|\|\|\|\|\|\|\|\|\|\|\| | |
| 101 | PRALLCLTLKNPIRRACISIVEWKPFEIIILLTIFANCVALAIYIPFPED | 150 |
| | . . . . . | |
| 151 | DSNATNSNLERVEYLFLIIFTVEAFLKVIAYGLLFHPNAYLRNGWNLLDF | 200 |
| | \|\|\|\|\|\|\|\|\|\|\|\|\|\|\|\|\|\|\|\|\|\|\|\|\|\|\|\|\|\|\|\|\|\|\|\|\|\|\|\|\|\|\|\|\|\|\|\|\|\| | |
| 151 | DSNATNSNLERVEYLFLIIFTVEAFLKVIAYGLLFHPNAYLRNGWNLLDF | 200 |
| | . . . . . | |
| 201 | IIVVVGLFSAILEQATKADGANALGGKGAGFDVKALRAFRVLRPLRLVSG | 250 |
| | \|\|\|\|\|\|\|\|\|\|\|\|\|\|\|\|\|\|\|\|\|\|\|\|\|\|\|\|\|\|\|\|\|\|\|\|\|\|\|\|\|\|\|\|\|\|\|\|\|\| | |
| 201 | IIVVVGLFSAILEQATKADGANALGGKGAGFDVKALRAFRVLRPLRLVSG | 250 |
| | . . . . . | |
| 251 | VPSLQVVLNSIIKAMVPLLHIALLVLFVIIIYAIIGLELFMGKMHKTCYN | 300 |
| | \|\|\|\|\|\|\|\|\|\|\|\|\|\|\|\|\|\|\|\|\|\|\|\|\|\|\|\|\|\|\|\|\|\|\|\|\|\|\|\|\|\|\|\|\|\|\|\|\|\| | |
| 251 | VPSLQVVLNSIIKAMVPLLHIALLVLFVIIIYAIIGLELFMGKMHKTCYN | 300 |
| | . . . . . | |
| 301 | QEGIADVPAEDDPSPCALETGHGRQCQNGTVCKPGWDGPKHGITNFDNFA | 350 |
| | \|\|\|\|\|\|\|\|\|\|\|\|\|\|\|\|\|\|\|\|\|\|\|\|\|\|\|\|\|\|\|\|\|\|\|\|\|\|\|\|\|\|\|\|\|\|\|\|\|\| | |
| 301 | QEGIADVPAEDDPSPCALETGHGRQCQNGTVCKPGWDGPKHGITNFDNFA | 350 |
| | . . . . . | |
| 351 | FAMLTVFQCITMEGWTDVLYWVNDAVGRDWPWIYFVTLIIIGSFFVLNLV | 400 |
| | \|\|\|\|\|\|\|\|\|\|\|\|\|\|\|\|\|\|\|\|\|\|\|\|\|\|\|\|\|\|\|\|\|\|\|\|\|\|\|\|\|\|\|\|\|\|\|\|\|\| | |
| 351 | FAMLTVFQCITMEGWTDVLYWVNDAVGRDWPWIYFVTLIIIGSFFVLNLV | 400 |
| | . . . . . | |
| 401 | LGVLSGEFSKEREKAKARGDFQKLREKQQLEEDLKGYLDWITQAEDIDPE | 450 |
| | \|\|\|\|\|\|\|\|\|\|\|\|\|\|\|\|\|\|\|\|\|\|\|\|\|\|\|\|\|\|\|\|\|\|\|\|\|\|\|\|\|\|\|\|\|\|\|\|\|\| | |
| 401 | LGVLSGEFSKEREKAKARGDFQKLREKQQLEEDLKGYLDWITQAEDIDPE | 450 |
| | . . . . . | |
| 451 | NEDEGMDEEKPRNRGTPAGMLDQKKGKFAWFSHSTETHVSMPTSETESVN | 500 |
| | \|\|\|\|\|\|\|\|\|\|\|\|\| :\|\|\|\|\|\|\|\|\|\|\| | |
| 451 | NEDEGMDEEKPRN.........................MSMPTSETESVN | 475 |
| | . . . . . | |
| 501 | TENVAGGDIEGENCGARLAHRISKSKFSRYWRRWNRFCRRKCRAAVKSNV | 550 |
| | \|\|\|\|\|\|\|\|\|\|\|\|\|\|\|\|\|\|\|\|\|\|\|\|\|\|\|\|\|\|\|\|\|\|\|\|\|\|\|\|\|\|\|\|\|\|\|\|\|\| | |
| 476 | TENVAGGDIEGENCGARLAHRISKSKFSRYWRRWNRFCRRKCRAAVKSNV | 525 |
| | . . . . . | |
| 551 | FYWLVIFLVFLNTLTIASEHYNQPNWLTEVQDTANKALLALFTAEMLLKM | 600 |
| | \|\|\|\|\|\|\|\|\|\|\|\|\|\|\|\|\|\|\|\|\|\|\|\|\|\|\|\|\|\|\|\|\|\|\|\|\|\|\|\|\|\|\|\|\|\|\|\|\|\| | |
| 526 | FYWLVIFLVFLNTLTIASEHYNQPNWLTEVQDTANKALLALFTAEMLLKM | 575 |
| | . . . . . | |
| 601 | YSLGLQAYFVSLFNRFDCFVVCGGILETILVETKIMSPLGISVLRCVRLL | 650 |
| | \|\|\|\|\|\|\|\|\|\|\|\|\|\|\|\|\|\|\|\|\|\|\|\|\|\|\|\|\|\|\|\|\|\|\|\|\|\|\|\|\|\|\|\|\|\|\|\|\|\| | |
| 576 | YSLGLQAYFVSLFNRFDCFVVCGGILETILVETKIMSPLGISVLRCVRLL | 625 |
| | . . . . . | |
| 651 | RIFKITRYWNSLSNLVASLLNSVRSIASLLLLLFLFIIIFSLLGMQLFGG | 700 |
| | \|\|\|\|\|\|\|\|\|\|\|\|\|\|\|\|\|\|\|\|\|\|\|\|\|\|\|\|\|\|\|\|\|\|\|\|\|\|\|\|\|\|\|\|\|\|\|\|\|\| | |
| 626 | RIFKITRYWNSLSNLVASLLNSVRSIASLLLLLFLFIIIFSLLGMQLFGG | 675 |
| | . . . . . | |
| 701 | KFNFDEMQTRRSTFDNFPQSLLTVFQILTGEDWNSVMYDGIMAYGGPSFP | 750 |
| | \|\|\|\|\|\|\|\|\|\|\|\|\|\|\|\|\|\|\|\|\|\|\|\|\|\|\|\|\|\|\|\|\|\|\|\|\|\|\|\|\|\|\|\|\|\|\|\|\|\| | |
| 676 | KFNFDEMQTRRSTFDNFPQSLLTVFQILTGEDWNSVMYDGIMAYGGPSFP | 725 |
| | . . . . . | |
| 751 | GMLVCIYFIILFICGNYILLNVFLAIAVDNLADAESLTSAQKEEEEEKER | 800 |
| | \|\|\|\|\|\|\|\|\|\|\|\|\|\|\|\|\|\|\|\|\|\|\|\|\|\|\|\|\|\|\|\|\|\|\|\|\|\|\|\|\|\|\|\|\|\|\|\|\|\| | |
| 726 | GMLVCIYFIILFICGNYILLNVFLAIAVDNLADAESLTSAQKEEEEEKER | 775 |
| | . . . . . | |
| 801 | KKLARTASPEKKQELVEKPAVGESKEEKIELKSITADGESPPATKINMDD | 850 |
| | \|\|\|\|\|\|\|\|\|\|\|\|\|\|\|\|\|\|\|\|\|\|\|\|\|\|\|\|\|\|\|\|\|\|\|\|\|\|\|\|\|\|\|\|\|\|\|\|\|\| | |
| 776 | KKLARTASPEKKQELVEKPAVGESKEEKIELKSITADGESPPATKINMDD | 825 |
| | . . . . . | |
| 851 | LQPNENEDKSPYPNPETTGEEDEEEPEMPVGPRPRPLSELHLKEKAVPMP | 900 |
| | \|\|\|\|\|\|\|\|\|\|\|\|\|\|\|\|\|\|\|\|\|\|\|\|\|\|\|\|\|\|\|\|\|\|\|\|\|\|\|\|\|\|\|\|\|\|\|\|\|\| | |
| 826 | LQPNENEDKSPYPNPETTGEEDEEEPEMPVGPRPRPLSELHLKEKAVPMP | 875 |
| | . . . . . | |
| 901 | EASAFFIFSSNNRFRLQCHRIVNDTIFTNLILFFILLSSISLAAEDPVQH | 950 |
| | \|\|\|\|\|\|\|\|\|\|\|\|\|\|\|\|\|\|\|\|\|\|\|\|\|\|\|\|\|\|\|\|\|\|\|\|\|\|\|\|\|\|\|\|\|\|\|\|\|\| | |
| 876 | EASAFFIFSSNNRFRLQCHRIVNDTIFTNLILFFILLSSISLAAEDPVQH | 925 |
| 951 | TSFRNHV | 957 |
| | \|\|\|\|\|\|: | |
| 926 | TSFRNHI | 932 |

### EXAMPLE 15

[0350] This Example relates to the variant HUMLVDCCB_P26 (SEQ ID NO:5; the nucleic acid sequence is given by SEQ ID NO:27), which is a variant alpha 1 subunit according to the present invention, and more specifically, is a splice variant of the known protein CCAC_HUMAN, which is encoded by the CACNA1C gene. This alpha subunit is the alpha 1C subunit, which forms the voltage-dependent L-type calcium channel. This subunit is also called the alpha subunit Cav1.2. The known protein is described in greater detail above with regard to Example 14.

[0351] The structure of the splice variant according to the present invention features a unique insertion and a skipped exon, as compared to the known protein sequence. An alignment is provided at the end of this section, while the comparison between the two sequences is described below.

[0352] According to preferred embodiments of the present invention, there is provided an isolated chimeric polypeptide encoding for HUMLVDCCB_P26, comprising a first amino acid sequence being at least 90% homologous to (SEQ ID NO: 134) MNANAAAGLAPEHIPTPGAALSWQAAIDAARQAKLMGSAGNATISTVSSTQRKR corresponding to amino acids 30-83 of CCAC_HUMAN, which also corresponds to amino acids 1-54 of HUMLVDCCB_P26, a bridging amino acid R corresponding to amino acid 55 of HUMLVDCCB_P26, a second amino acid sequence being at least 90% homologous to (SEQ ID NO: 135) QYGKPKKQGSTTATRPPRALLCLTLKNPIRRACISIVEWKPFEIIILLTIFANCVALAIYIPFPEDDSNATNSNLERVEYLFLIIFTVEAFLKVIAYGLLFHPNAYLRNGWNLLDFIIVVVGLFSAILEQATKADGANALGGKGAGFDVKALRAFRVLRPLRLVSGVPSLQVVLNSIIKAMVPLLHIALLVLFVIIIYAIIGLELFMGKMHKTCYNQEGIADVPAEDDPSPCALETGHGRQCQNGTVCKPGWDGPKHGITNFDNFAFAMLTVFQCITMEGWTDVLYW corresponding to amino acids 85-371 of CCAC_HUMAN, which also corresponds to amino acids 56-342 of HUMLVDCCB_P26, a third amino acid sequence being at least 70%, optionally at least 80%, preferably at least 85%, more preferably at least 90% and most preferably at least 95% homologous to a polypeptide having the sequence (SEQ ID NO: 136) MQDAMGYELPWVYFVSLVIF corresponding to amino acids 343-362 of HUMLVDCCB_P26; a fourth amino acid sequence being at least 90% homologous to (SEQ ID NO: 137) GSFFVLNLVLGVLSGEFSKEREKAKARGDFQKLREKQQLEEDLKGYLDWITQAEDIDPENEDEGMDEEKPRNMSMPTSETESVNTENVAGGDIEGENCGARLAHRISKSKFSRYWRRWNRFCRRKCRAAVKSNVFYWLVIFLVFLNTLTIASEHYNQPNWLTEVQDTANKALLALFTAEMLLKMYSLGLQAYFVSLFNRFDCFVVCGGILETILVETKIMSPLGISVLRCVRLLRIFKITRYWNSLSNLVASLLNSVRSIASLLLLLFLFIIIFSLLGMQLFGGKFNFDEMQTRRSTFDNFPQSLLTVFQILTGEDWNSVMYDGIMAYGGPSFPGMLVCIYFIILFICGNYILLNVFLAIAVDNLADAESLTSAQKEEEEEKERKKLARTASPEKKQELVEKPAVGESKEEKIELKSITADGESPPATKINMDDLQPNENEDKSPYPNPETTGEEDEEEPEMPVGPRPRPLSELHLKEKAVPMPEASAFFIFSSNNRFRLQCHRIVNDTIFTNLILFFILLSSISLAAEDPVQHTSFR NHILFYFDIVFTTIFTIEIA corresponding to amino acids 392-949 of CCAC_HUMAN, which also corresponds to amino acids 363-920 of HUMLVDCCB_P26, a fifth amino acid sequence being at least 90% homologous to (SEQ ID NO: 138) LKMTAYGAFLHKGSFCRNYFNILDLLVVSVSLISFGIQSSAINVVKILRVLRVLRPLRAINRAKGLKHVVQCVFVAIRTIGNIVIVTTLLQFMFACIGVQLFKGKLYTCSDSSKQTEAECKGNYITYKDGEVDHPIIQPRSWENSKFDFDNVLAAMMALFTVSTFEGWPELLYRSIDSHTEDKGPIYNYRVEISIFFIIYIIIIAFFMMNIFVGFVIVTFQEQGEQEYKNCELDKNQRQCVEYALKARPLRRYIPKNQHQYKVWYVVNSTYFEYLMFVLILLNTICLAMQHYGQSCLFKIAMNILNMLFTGLFTVEMILKLIAFKPK corresponding to amino acids 970-1296 of CCAC_HUMAN, which also corresponds to amino acids 921-1247 of HUMLVDCCB_P26, a sixth amino acid sequence being at least 90% homologous to (SEQ ID NO: 139) HYFCDAWNTFDALIVVGSIVDIAITEVN corresponding to amino acids 1325-1352 of CCAC_HUMAN, which also corresponds to amino acids 1248-1275 of HUMLVDCCB_P26, a seventh amino acid sequence being at least 90% homologous to (SEQ ID NO: 140) NAEENSRISITFFRLFRVMRLVKLLSRGEGIRTLLWTFIKSFQALPYVALLIVMLFFIYAVIGMQVFGKIALNDTTEFQTFPQAVLLLFRCATGEAWQDIMLACMPGKKCAPESEPSNSTEGETPCGSSFAVFYFISFYMLCAFLIINLFVAVIMDNFDYLTRDWSILGPHHLDEFKRIWAEYDPEAKGRIKHLDVVTLLRRIQPPLGFGKLCPHRVACKRLVSMNMPLNSDGTVMFNATLFALVRTALRIKTEGNLEQANEELRAIIKKIWKRTSMKLLDQVVPPAGDDEVTVGKFYATFLIQEYFRKFKKRKEQGLVGKPSQRNALSLQAGLRTLHDIGPEIRRAISGDLTAEEELDKAMKEAVSAASEDDIFRRAGGLFGNHVSYYQSDGRSAFPQTFTTQRPLHINKAGSSQGDTESPSHEKLVDSTFTPSSYSSTGSNANINNANNTALGRLPRPAGYPSTVSTVEGHGPPLSPAIRVQEVAWKLSSNR corresponding to amino acids 1364-1863 of CCAC_HUMAN, which also corresponds to amino acids 1276-1775 of HUMLVDCCB_P26, an eighth amino acid sequence being at least 70%, optionally at least 80%, preferably at least 85%, more preferably at least 90% and most preferably at least 95% homologous to a polypeptide having the sequence (SEQ ID NO: 141) MHCCDMLDGGTFPPALGPRRAPPCLHQQLQGSLAGLREDTPCIVPGHASLCCSSRVGEWLPAGCTAPQHA corresponding to amino acids 1776-1845 of HUMLVDCCB_P26; a ninth amino acid sequence being at least 90% homologous to (SEQ ID NO: 142) RCHSRESQAAMAGQEETSQDETYEVKMNHDTEACSEPSLLSTEMLSYQDDENRQLTLPEEDKRDIRQSPKRGFLRSASLGRRASFHLECLKRQKDRGGDISQKTVLPLHLVHHQALAVAGLSPLLQRSHSPASFPRPFATPPATPGSRGWPPQPVPTLRLEGVESSEKLNSSFPSIHCGSWAETTPGGGGSSAARRVRPVSLMVPSQAGAPGRQFHGSASSLVEAVLISEGLGQFAQDPKFIEVTTQELADACDMTIEEMESAADNILSGGAPQSPNGALLPFVNCRDAGQDRAGGEEDAGCVRARG corresponding to amino acids 1898-2204 of CCAC_HUMAN, which also corresponds to amino acids 1846-2152 of HUMLVDCCB_P26, a bridging amino acid R corresponding to amino acid 2153 of HUMLVDCCB_P26, and a tenth amino acid sequence being at least 90% homologous to (SEQ ID NO: 143) PSEEELQDSRVYVSSL corresponding to amino acids 2206-2221 of CCAC_HUMAN, which also corresponds to amino acids 2154-2169 of HUMLVDCCB_P26, wherein said first amino acid sequence, bridging amino acid, second amino acid sequence, third amino acid sequence, fourth amino acid sequence, fifth amino acid sequence, sixth amino acid sequence, seventh amino acid sequence, eight amino acid sequence, ninth amino acid sequence, bridging amino acid, and tenth amino acid sequence are contiguous and in a sequential order.

[0353] According to preferred embodiments of the present invention, there is provided an isolated chimeric polypeptide encoding for an edge portion of HUMLVDCCB_P26, comprising a polypeptide having a length “n”, wherein n is at least about 10 amino acids in length, optionally at least about 20 amino acids in length, preferably at least about 30 amino acids in length, more preferably at least about 40 amino acids in length and most preferably at least about 50 amino acids in length, wherein at least two amino acids comprise AL, having a structure as follows: a sequence starting from any of amino acid numbers 920−x to 921; and ending at any of amino acid numbers 921+((n−2)−x), in which x varies from 0 to n−2.

[0354] According to preferred embodiments of the present invention, there is provided an isolated chimeric polypeptide encoding for an edge portion of HUMLVDCCB_P26, comprising a polypeptide having a length “n”, wherein n is at least about 10 amino acids in length, optionally at least about 20 amino acids in length, preferably at least about 30 amino acids in length, more preferably at least about 40 amino acids in length and most preferably at least about 50 amino acids in length, wherein at least two amino acids comprise KH, having a structure as follows: a sequence starting from any of amino acid numbers 1247−x to 1248; and ending at any of amino acid numbers 1248+((n−2)−x), in which x varies from 0 to n−2.

[0355] According to preferred embodiments of the present invention, there is provided an isolated chimeric polypeptide encoding for an edge portion of HUMLVDCCB_P26, comprising a polypeptide having a length “n”, wherein n is at least about 10 amino acids in length, optionally at least about 20 amino acids in length, preferably at least about 30 amino acids in length, more preferably at least about 40 amino acids in length and most preferably at least about 50 amino acids in length, wherein at least two amino acids comprise NN, having a structure as follows: a sequence starting from any of amino acid numbers 1275−x to 1276; and ending at any of amino acid numbers 1276+((n−2)−x), in which x varies from 0 to n−2.

[0356] According to preferred embodiments of the present invention, there is provided an isolated chimeric polypeptide encoding for an edge portion of HUMLVDCCB_P26, comprising a polypeptide having a length “n”, wherein n is at least about 10 amino acids in length, optionally at least about 20 amino acids in length, preferably at least about 30 amino acids in length, more preferably at least about 40 amino acids in length and most preferably at least about 50 amino acids in length, wherein at least two amino acids comprise CD, having a structure as follows: a sequence starting from any of amino acid numbers 1779−x to 1780; and ending at any of amino acid numbers 1780+((n−2)−x), in which x varies from 0 to n−2.

[0357] According to preferred embodiments of the present invention, there is provided an isolated polypeptide encoding for an edge portion of HUMLVDCCB_P26, comprising an amino acid sequence being at least 70%, optionally at least about 80%, preferably at least about 85%, more preferably at least about 90% and most preferably at least about 95% homologous to the sequence encoding for (SEQ ID NO: 144) CLHQQLQGSLAGLREDTPCIVPGHASLCCSSRVGEWLPAGCTAPQHA, corresponding to HUMLVDCCB_P26.

[0358] According to preferred embodiments of the present invention, there is provided a bridge portion of HUMLVDCCB_P26, comprising a polypeptide having a length “n”, wherein n is at least about 10 amino acids in length, optionally at least about 20 amino acids in length, preferably at least about 30 amino acids in length, more preferably at least about 40 amino acids in length and most preferably at least about 50 amino acids in length, wherein at least two amino acids comprise P, having a structure as follows (numbering according to HUMLVDCCB_P26): a sequence starting from any of amino acid numbers 1896−x to 1896; and ending at any of amino acid numbers 1799+((n−2)−x), in which x varies from 0 to n−2.

[0359] According to preferred embodiments of the present invention, there is provided a unique insertion, comprising a polypeptide being at least 70%, optionally at least 80%, preferably at least 85%, more preferably at least 90% and most preferably at least 95% homologous to a polypeptide having the sequence (SEQ ID NO: 145) MQDAMGYELPWVYFVSLVIF of HUMLVDCCB_P26.

[0360] According to preferred embodiments of the present invention, there is provided a unique insertion, comprising a polypeptide being at least 70%, optionally at least 80%, preferably at least 85%, more preferably at least 90% and most preferably at least 95% homologous to a polypeptide having the sequence (SEQ ID NO: 146) MHCCDMLDGGTFPPALGPRRAPPCLHQQLQGSLAGLREDTPCIVPGHASLCCSSRVGEWLPAGCTAPQHA of HUMLVDCCB_P26.

[0361] Domains affected by alternative splicing include the S2 transmembrane domain of domain III; the extracellular loop between S2 and S3 transmembrane domains of domain III; the extracellular loop between S2 and S3 transmembrane domains of domain IV; the S3 transmembrane domain of domain IV; the extracellular loop between S3 and S4 transmembrane domains of domain IV; the cytoplasmic C-terminus region of the protein.

[0362] Certain changes in the variant are explained with regard to example 14.

[0363] From the above description of the effect of changes to the C-terminus domain of this variant, it is expected that the variant will have greater current as compared to the known protein and a stronger calcium dependence of inactivation. It is also expected to modulate the Ca⁺²⁻ dependent inactivation of the channel.

[0364] In addition, the changes in the S2 transmembrane domain of domain III might influence the voltage-dependent action of dihydropyridines.

Sequence name: CCAC_HUMAN

documentation:

of HUMLVDCCP_P26 (SEQ ID NO: 5)×CCAC_HUMAN (SEQ ID NO: 147) . . .

segment 1/1:

Alignment segment 1/1:

[0365] Quality: 1961.00

Escore: 0

Matching length: 2071 Total

length: 2290

Matching Percent Similarity: 100.00 Matching Percent

Identity: 100.00

Total Percent Similarity: 90.44 Total Percent

Identity: 90.44

[0366] Gaps: 11

[0367] Alignment:

| | . . . . . | |
|---|---|---|
| 1 | MNANAAAGLAPEHIPTPGAALSWQAAIDAARQAKLMGSAGNATISTVSST | 50 |
| | \|\|\|\|\|\|\|\|\|\|\|\|\|\|\|\|\|\|\|\|\|\|\|\|\|\|\|\|\|\|\|\|\|\|\|\|\|\|\|\|\|\|\|\|\|\|\|\|\|\| | |
| 30 | MNANAAAGLAPEHIPTPGAALSWQAAIDAARQAKLMGSAGNATISTVSST | 79 |
| | . . . . . | |
| 51 | QRKRRQYGKPKKQGSTTATRPPRALLCLTLKNPIRRACISIVEWKPFEI | 99 |
| | \|\|\|\|\|\|\|\|\|\|\|\|\|\|\|\|\|\|\|\|\|\|\|\|\|\|\|\|\|\|\|\|\|\|\|\|\|\|\|\|\|\|\|\|\|\|\|\|\|\| | |
| 80 | QRKRQQYGKPKKQGSTTATRPPRALLCLTLKNPIRRACISIVEWKPFEI | 128 |
| | . . . . . | |
| 100 | IILLTIFANCVALAIYIPFPEDDSNATNSNLERVEYLFLIIFTVEAFLKV | 149 |
| | \|\|\|\|\|\|\|\|\|\|\|\|\|\|\|\|\|\|\|\|\|\|\|\|\|\|\|\|\|\|\|\|\|\|\|\|\|\|\|\|\|\|\|\|\|\|\|\|\|\| | |
| 129 | IILLTIFANCVALAIYIPFPEDDSNATNSNLERVEYLFLIIFTVEAFLKV | 178 |
| | . . . . . | |
| 150 | IAYGLLFHPNAYLRNGWNLLDFIIVVVGLFSAILEQATKADGANALGGKG | 199 |
| | \|\|\|\|\|\|\|\|\|\|\|\|\|\|\|\|\|\|\|\|\|\|\|\|\|\|\|\|\|\|\|\|\|\|\|\|\|\|\|\|\|\|\|\|\|\|\|\|\|\| | |
| 179 | IAYGLLFHPNAYLRNGWNLLDFIIVVVGLFSAILEQATKADGANALGGKG | 228 |
| | . . . . . | |
| 200 | AGFDVKALRAFRVLRPLRLVSGVPSLQVVLNSIIKAMVPLLHIALLVLFV | 249 |
| | \|\|\|\|\|\|\|\|\|\|\|\|\|\|\|\|\|\|\|\|\|\|\|\|\|\|\|\|\|\|\|\|\|\|\|\|\|\|\|\|\|\|\|\|\|\|\|\|\|\| | |
| 229 | AGFDVKALRAFRVLRPLRLVSGVPSLQVVLNSIIKAMVPLLHIALLVLFV | 278 |
| | . . . . . | |
| 250 | IIIYAIIGLELFMGKMHKTCYNQEGIADVPAEDDPSPCALETGHGRQCQN | 299 |
| | \|\|\|\|\|\|\|\|\|\|\|\|\|\|\|\|\|\|\|\|\|\|\|\|\|\|\|\|\|\|\|\|\|\|\|\|\|\|\|\|\|\|\|\|\|\|\|\|\|\| | |
| 279 | IIIYAIIGLELFMGKMHKTCYNQEGIADVPAEDDPSPCALETGHGRQCQN | 328 |
| | . . . . . | |
| 300 | GTVCKPGWDGPKHGITNFDNFAFAMLTVFQCITMEGWTDVLYWMQDAMGY | 349 |
| | \|\|\|\|\|\|\|\|\|\|\|\|\|\|\|\|\|\|\|\|\|\|\|\|\|\|\|\|\|\|\|\|\|\|\|\|\|\|\|\|\|\|\| | |
| 329 | GTVCKPGWDGPKHGITNFDNFAFAMLTVFQCITMEGWTDVLYW....... | 371 |
| | . . . . . | |
| 350 | ELPWVYFVSLVIF....................GSFFVLNLVLGVL | 375 |
| | \|\|\|\|\|\|\|\|\|\|\|\|\| | |
| 372 | .............VNDAVGRDWPWIYFVTLIIIGSFFVLNLVLGVL | 404 |
| | . . . . . | |
| 376 | SGEFSKEREKAKARGDFQKLREKQQLEEDLKGYLDWITQAEDIDPENEDE | 425 |
| | \|\|\|\|\|\|\|\|\|\|\|\|\|\|\|\|\|\|\|\|\|\|\|\|\|\|\|\|\|\|\|\|\|\|\|\|\|\|\|\|\|\|\|\|\|\|\|\|\|\| | |
| 405 | SGEFSKEREKAKARGDFQKLREKQQLEEDLKGYLDWITQAEDIDPENEDE | 454 |
| | . . . . . | |
| 426 | GMDEEKPRNMSMPTSETESVNTENVAGGDIEGENCGARLAHRISKSKFSR | 475 |
| | \|\|\|\|\|\|\|\|\|\|\|\|\|\|\|\|\|\|\|\|\|\|\|\|\|\|\|\|\|\|\|\|\|\|\|\|\|\|\|\|\|\|\|\|\|\|\|\|\|\| | |
| 455 | GMDEEKPRNMSMPTSETESVNTENVAGGDIEGENCGARLAHRISKSKFSR | 504 |
| | . . . . . | |
| 476 | YWRRSNRFCRRKCRAAVKSNVFYWLVIFLVFLNTLTIASEHYNQPNWLTE | 525 |
| | \|\|\|\|\|\|\|\|\|\|\|\|\|\|\|\|\|\|\|\|\|\|\|\|\|\|\|\|\|\|\|\|\|\|\|\|\|\|\|\|\|\|\|\|\|\|\|\|\|\| | |
| 505 | YWRRSNRFCRRKCRAAVKSNVFYWLVIFLVFLNTLTIASEHYNQPNWLTE | 554 |
| | . . . . . | |
| 526 | VQDTANKALLALFTAEMLLKMYSLGLQAYFVSLFNRFDCFVVCGGILETI | 575 |
| | \|\|\|\|\|\|\|\|\|\|\|\|\|\|\|\|\|\|\|\|\|\|\|\|\|\|\|\|\|\|\|\|\|\|\|\|\|\|\|\|\|\|\|\|\|\|\|\|\|\| | |
| 555 | VQDTANKALLALFTAEMLLKMYSLGLQAYFVSLFNRFDCFVVCGGILETI | 604 |
| | . . . . . | |
| 576 | LVETKIMSPLGISVLRCVRLLRIFKITRYWNSLSNLVASLLNSVRSIASL | 625 |
| | \|\|\|\|\|\|\|\|\|\|\|\|\|\|\|\|\|\|\|\|\|\|\|\|\|\|\|\|\|\|\|\|\|\|\|\|\|\|\|\|\|\|\|\|\|\|\|\|\|\| | |
| 605 | LVETKIMSPLGISVLRCVRLLRIFKITRYWNSLSNLVASLLNSVRSIASL | 654 |
| | . . . . . | |
| 626 | LLLLFLFIIIFSLLGMQLFGGKFNFDEMQTRRSTFDNFPQSLLTVFQILT | 675 |
| | \|\|\|\|\|\|\|\|\|\|\|\|\|\|\|\|\|\|\|\|\|\|\|\|\|\|\|\|\|\|\|\|\|\|\|\|\|\|\|\|\|\|\|\|\|\|\|\|\|\| | |
| 655 | LLLLFLFIIIFSLLGMQLFGGKFNFDEMQTRRSTFDNFPQSLLTVFQILT | 704 |
| | . . . . . | |
| 676 | GEDWNSVMYDGIMAYGGPSFPGMLVDIYFIILFICGNYILLNVFLAIAVD | 725 |
| | \|\|\|\|\|\|\|\|\|\|\|\|\|\|\|\|\|\|\|\|\|\|\|\|\|\|\|\|\|\|\|\|\|\|\|\|\|\|\|\|\|\|\|\|\|\|\|\|\|\| | |
| 705 | GEDWNSVMYDGIMAYGGPSFPGMLVDIYFIILFICGNYILLNVFLAIAVD | 754 |
| | . . . . . | |
| 726 | NLADAESLTSAQKEEEEEKERKKLARTASPEKKQELVEKPAVGESKEEKI | 775 |
| | \|\|\|\|\|\|\|\|\|\|\|\|\|\|\|\|\|\|\|\|\|\|\|\|\|\|\|\|\|\|\|\|\|\|\|\|\|\|\|\|\|\|\|\|\|\|\|\|\|\| | |
| 755 | NLADAESLTSAQKEEEEEKERKKLARTASPEKKQELVEKPAVGESKEEKI | 804 |
| | . . . . . | |
| 776 | ELKSITADGESPPATKINMDDLQPNENEDKSPYPNPETTGEEDEEEPEMP | 825 |
| | \|\|\|\|\|\|\|\|\|\|\|\|\|\|\|\|\|\|\|\|\|\|\|\|\|\|\|\|\|\|\|\|\|\|\|\|\|\|\|\|\|\|\|\|\|\|\|\|\|\| | |
| 805 | ELKSITADGESPPATKINMDDLQPNENEDKSPYPNPETTGEEDEEEPEMP | 854 |
| | . . . . . | |
| 826 | VGPRPRPLSELHLKEKAVPMPEASAFFIFSSNNRFRLQCHRIVNDTIFTN | 875 |
| | \|\|\|\|\|\|\|\|\|\|\|\|\|\|\|\|\|\|\|\|\|\|\|\|\|\|\|\|\|\|\|\|\|\|\|\|\|\|\|\|\|\|\|\|\|\|\|\|\|\| | |
| 855 | VGPRPRPLSELHLKEKAVPMPEASAFFIFSSNNRFRLQCHRIVNDTIFTN | 904 |
| | . . . . . | |
| 876 | LILFFILLSSISLAAEDPVQHTSFRNHILFYFDIVFTTIFTIEIA..... | 920 |
| | \|\|\|\|\|\|\|\|\|\|\|\|\|\|\|\|\|\|\|\|\|\|\|\|\|\|\|\|\|\|\|\|\|\|\|\|\|\|\|\|\|\|\|\|\| | |
| 905 | LILFFILLSSISLAAEDPVQHTSFRNHILFYFDIVFTTIFTIEIALKILG | 954 |
| | . . . . . | |
| 921 | ...............LKMTAYGAFLHKGSFCRNYFNILDLLVVSVSLISF | 955 |
| | \|\|\|\|\|\|\|\|\|\|\|\|\|\|\|\|\|\|\|\|\|\|\|\|\|\|\|\|\|\|\|\|\|\|\| | |
| 955 | NADYVFTSIFTLEIILKMTAYGAFLHKGSFCRNYFNILDLLVVSVSLISF | 1004 |
| | . . . . . | |
| 956 | GIQSSAINVVKILRVLRVLRPLRAINRAKGLKHVVQCVFVAIRTIGNIVI | 1005 |
| | \|\|\|\|\|\|\|\|\|\|\|\|\|\|\|\|\|\|\|\|\|\|\|\|\|\|\|\|\|\|\|\|\|\|\|\|\|\|\|\|\|\|\|\|\|\|\|\|\|\| | |
| 1005 | GIQSSAINVVKILRVLRVLRPLRAINRAKGLKHVVQCVFVAIRTIGNIVI | 1054 |
| | . . . . . | |
| 1006 | VTTLLQFMFACIGVQLFKGKLYTCSDSSKQTEAECKGNYITYKDGEVDHP | 1055 |
| | \|\|\|\|\|\|\|\|\|\|\|\|\|\|\|\|\|\|\|\|\|\|\|\|\|\|\|\|\|\|\|\|\|\|\|\|\|\|\|\|\|\|\|\|\|\|\|\|\|\| | |
| 1055 | VTTLLQFMFACIGVQLFKGKLYTCSDSSKQTEAECKGNYITYKDGEVDHP | 1104 |
| | . . . . . | |
| 1056 | IIQPRSWENSKFDFDNVLAAMMALFTVSTFEGWPELLYRSIDSHTEDKGP | 1105 |
| | \|\|\|\|\|\|\|\|\|\|\|\|\|\|\|\|\|\|\|\|\|\|\|\|\|\|\|\|\|\|\|\|\|\|\|\|\|\|\|\|\|\|\|\|\|\|\|\|\|\| | |
| 1105 | IIQPRSWENSKFDFDNVLAAMMALFTVSTFEGWPELLYRSIDSHTEDKGP | 1154 |
| | . . . . . | |
| 1106 | IYNYRVEISIFFIIYIIIIAFFMMNIFVGFVIVTFQEQGEQEYKNCELDK | 1155 |
| | \|\|\|\|\|\|\|\|\|\|\|\|\|\|\|\|\|\|\|\|\|\|\|\|\|\|\|\|\|\|\|\|\|\|\|\|\|\|\|\|\|\|\|\|\|\|\|\|\|\| | |
| 1155 | IYNYRVEISIFFIIYIIIIAFFMMNIFVGFVIVTFQEQGEQEYKNCELDK | 1204 |
| | . . . . . | |
| 1156 | NQRQCVEYALKARPLRRYIPKNQHQYKVWYVVNSTYFEYLMFVLILLNTI | 1205 |
| | \|\|\|\|\|\|\|\|\|\|\|\|\|\|\|\|\|\|\|\|\|\|\|\|\|\|\|\|\|\|\|\|\|\|\|\|\|\|\|\|\|\|\|\|\|\|\|\|\|\| | |
| 1205 | NQRQCVEYALKARPLRRYIPKNQHQYKVWYVVNSTYFEYLMFVLILLNTI | 1254 |
| | . . . . . | |
| 1206 | CLAMQHYGQSCLFKIAMNILNMLFTGLFTVEMILKLIAFKPK........ | 1247 |
| | \|\|\|\|\|\|\|\|\|\|\|\|\|\|\|\|\|\|\|\|\|\|\|\|\|\|\|\|\|\|\|\|\|\|\|\|\|\|\|\|\|\| | |
| 1255 | CLAMQHYGQSCLFKIAMNILNMLFTGLFTVEMILKLIAFKPKGYFSDPWN | 1304 |
| | . . . . . | |
| 1248 | ....................HYFCDAWNTFDALTVVGSIVDIAITEVN.. | 1275 |
| | \|\|\|\|\|\|\|\|\|\|\|\|\|\|\|\|\|\|\|\|\|\|\|\|\|\|\|\| | |
| 1305 | VFDFLIVIGSIIDVILSETNHYFCDAWNTFDALIVVGSIVDIAITEVNPA | 1354 |
| | . . . . . | |
| 1276 | .........NAEENSRISITFFRLFRVMRLVKLLSRGEGIRTLLWTFIKS | 1316 |
| | \|\|\|\|\|\|\|\|\|\|\|\|\|\|\|\|\|\|\|\|\|\|\|\|\|\|\|\|\|\|\|\|\|\|\|\|\|\|\|\|\| | |
| 1355 | EHTQCSPSMNAEENSRISITFFRLFRVMRLVKLLSRGEGIRTLLWTFIKS | 1404 |
| | . . . . . | |
| 1317 | FQALPYVALLIVMLFFIYAVIGMQVFGKIALNDTTEINRNNNFQTFPQAV | 1366 |
| | \|\|\|\|\|\|\|\|\|\|\|\|\|\|\|\|\|\|\|\|\|\|\|\|\|\|\|\|\|\|\|\|\|\|\|\|\|\|\|\|\|\|\|\|\|\|\|\|\|\| | |
| 1405 | FQALPYVALLIVMLFFIYAVIGMQVFGKIALNDTTEINRNNNFQTFPQAV | 1454 |
| | . . . . . | |
| 1367 | LLLFRCATGEAWQDIMLACMPGKKCAPESEPSNSTEGETPCGSSFAVFYF | 1416 |
| | \|\|\|\|\|\|\|\|\|\|\|\|\|\|\|\|\|\|\|\|\|\|\|\|\|\|\|\|\|\|\|\|\|\|\|\|\|\|\|\|\|\|\|\|\|\|\|\|\|\| | |
| 1455 | LLLFRCATGEAWQDIMLACMPGKKCAPESEPSNSTEGETPCGSSFAVFYF | 1504 |
| | . . . . . | |
| 1417 | ISFYMLCAFLIINLFVAVIMDNFDYLTRDWSILGPHHLDEFKRIWAEYDP | 1466 |
| | \|\|\|\|\|\|\|\|\|\|\|\|\|\|\|\|\|\|\|\|\|\|\|\|\|\|\|\|\|\|\|\|\|\|\|\|\|\|\|\|\|\|\|\|\|\|\|\|\|\| | |
| 1505 | ISFYMLCAFLIINLFVAVIMDNFDYLTRDWSILGPHHLDEFKRIWAEYDP | 1554 |
| | . . . . . | |
| 1467 | EAKGRIKHLDVVTLLRRIQPPLGFGKLCPHRVACKRLVSMNMPLNSDGTV | 1516 |
| | \|\|\|\|\|\|\|\|\|\|\|\|\|\|\|\|\|\|\|\|\|\|\|\|\|\|\|\|\|\|\|\|\|\|\|\|\|\|\|\|\|\|\|\|\|\|\|\|\|\| | |
| 1555 | EAKGRIKHLDVVTLLRRIQPPLGFGKLCPHRVACKRLVSMNMPLNSDGTV | 1604 |
| | . . . . . | |
| 1517 | MFNATLFALVRTALRIKTEGNLEQANEELRAIIKKIWKRTSMKLLDQVVP | 1566 |
| | \|\|\|\|\|\|\|\|\|\|\|\|\|\|\|\|\|\|\|\|\|\|\|\|\|\|\|\|\|\|\|\|\|\|\|\|\|\|\|\|\|\|\|\|\|\|\|\|\|\| | |
| 1605 | MFNATLFALVRTALRIKTEGNLEQANEELRAIIKKIWKRTSMKLLDQVVP | 1654 |
| | . . . . . | |
| 1567 | PAGDDEVTVGKFYATFLIQEYFRKFKKRKEQGLVGKPSQRNALSLQAGLR | 1616 |
| | \|\|\|\|\|\|\|\|\|\|\|\|\|\|\|\|\|\|\|\|\|\|\|\|\|\|\|\|\|\|\|\|\|\|\|\|\|\|\|\|\|\|\|\|\|\|\|\|\|\| | |
| 1655 | PAGDDEVTVGKFYATFLIQEYFRKFKKRKEQGLVGKPSQRNALSLQAGLR | 1704 |
| | . . . . . | |
| 1617 | TLHDIGPEIRRAISGDLTAEEELDKAMKEAVSAASEDDIFRRAGGLFGNH | 1666 |
| | \|\|\|\|\|\|\|\|\|\|\|\|\|\|\|\|\|\|\|\|\|\|\|\|\|\|\|\|\|\|\|\|\|\|\|\|\|\|\|\|\|\|\|\|\|\|\|\|\|\| | |
| 1705 | TLHDIGPEIRRAISGDLTAEEELDKAMKEAVSAASEDDIFRRAGGLFGNH | 1754 |
| | . . . . . | |
| 1667 | VSYYQSDGRSAFPQTFTTQRPLHINKAGSSQGDTESPSHEKLVDSTFTPS | 1716 |
| | \|\|\|\|\|\|\|\|\|\|\|\|\|\|\|\|\|\|\|\|\|\|\|\|\|\|\|\|\|\|\|\|\|\|\|\|\|\|\|\|\|\|\|\|\|\|\|\|\|\| | |
| 1755 | VSYYQSDGRSAFPQTFTTQRPLHINKAGSSQGDTESPSHEKLVDSTFTPS | 1804 |
| | . . . . . | |
| 1717 | SYSSTGSNANINNANNTALGRLPRPAGYPSTVSTVEGHGPPLSPAIRVQE | 1766 |
| | \|\|\|\|\|\|\|\|\|\|\|\|\|\|\|\|\|\|\|\|\|\|\|\|\|\|\|\|\|\|\|\|\|\|\|\|\|\|\|\|\|\|\|\|\|\|\|\|\|\| | |
| 1805 | SYSSTGSNANINNANNTALGRLPRPAGYPSTVSTVEGHGPPLSPAIRVQE | 1854 |
| | . . . . . | |
| 1767 | VAWKLSSNR..................................MHCCDM | 1781 |
| | \|\|\|\|\|\|\|\|\| | |
| 1855 | VAWKLSSNRERHVPVCEDLELRRDSGSAGTQAHCLLLRRANPS...... | 1897 |
| | . . . . . | |
| 1782 | LDGGTFPPALGPRRAPPCLHQQLQGSLAGLREDTPCIVPGHASLCCSSRV | 1831 |
| 1897 | .................................................. | 1897 |
| | . . . . . | |
| 1832 | GEWLPAGCTAPQHARCHSRESQAAMAGQEETSQDETYEVKMNHDTEACSE | 1881 |
| | \|\|\|\|\|\|\|\|\|\|\|\|\|\|\|\|\|\|\|\|\|\|\|\|\|\|\|\|\|\|\|\|\|\|\|\| | |
| 1898 | ..............RCHSRESQAAMAGQEETSQDETYEVKMNHDTEACSE | 1933 |
| | . . . . . | |
| 1882 | PSLLSTEMLSYQDDENRQLTLPEEDKRDIRQSPKRGFLRSASLGRRASFH | 1931 |
| | \|\|\|\|\|\|\|\|\|\|\|\|\|\|\|\|\|\|\|\|\|\|\|\|\|\|\|\|\|\|\|\|\|\|\|\|\|\|\|\|\|\|\|\|\|\|\|\|\|\| | |
| 1934 | PSLLSTEMLSYQDDENRQLTLPEEDKRDIRQSPKRGFLRSASLGRRASFH | 1983 |
| | . . . . . | |
| 1932 | LECLKRQKDRGGDISQKTVLPLHLVHHQALAVAGLSPLLQRSHSPASFPR | 1981 |
| | \|\|\|\|\|\|\|\|\|\|\|\|\|\|\|\|\|\|\|\|\|\|\|\|\|\|\|\|\|\|\|\|\|\|\|\|\|\|\|\|\|\|\|\|\|\|\|\|\|\| | |
| 1984 | LECLKRQKDRGGDISQKTVLPLHLVHHQALAVAGLSPLLQRSHSPASFPR | 2033 |
| | . . . . . | |
| 1982 | PFATPPATPGSRGWPPQPVPTLRLEGVESSEKLNSSFPSIHCGSWAETTP | 2031 |
| | \|\|\|\|\|\|\|\|\|\|\|\|\|\|\|\|\|\|\|\|\|\|\|\|\|\|\|\|\|\|\|\|\|\|\|\|\|\|\|\|\|\|\|\|\|\|\|\|\|\| | |
| 2034 | PFATPPATPGSRGWPPQPVPTLRLEGVESSEKLNSSFPSIHCGSWAETTP | 2083 |
| | . . . . . | |
| 2032 | GGGGSSAARRVRPVSLMVPSQAGAPGRQFHGSASSLVEAVLISEGLGQFA | 2081 |
| | \|\|\|\|\|\|\|\|\|\|\|\|\|\|\|\|\|\|\|\|\|\|\|\|\|\|\|\|\|\|\|\|\|\|\|\|\|\|\|\|\|\|\|\|\|\|\|\|\|\| | |
| 2084 | GGGGSSAARRVRPVSLMVPSQAGAPGRQFHGSASSLVEAVLISEGLGQFA | 2133 |
| | . . . . . | |
| 2082 | QDPKFIEVTTQELADACDMTIEEMESAADNILSGGAPQSPNGALLPFVNC | 2131 |
| | \|\|\|\|\|\|\|\|\|\|\|\|\|\|\|\|\|\|\|\|\|\|\|\|\|\|\|\|\|\|\|\|\|\|\|\|\|\|\|\|\|\|\|\|\|\|\|\|\|\| | |
| 2134 | QDPKFIEVTTQELADACDMTIEEMESAADNILSGGAPQSPNGALLPFVNC | 2183 |
| | . . . . | |
| 2132 | RDAGQDRAGGEEDAGCVRARGRPSEEELQDSRVYVSSL | 2169 |
| | \|\|\|\|\|\|\|\|\|\|\|\|\|\|\|\|\|\|\|\|\| \|\|\|\|\|\|\|\|\|\|\|\|\|\|\|\| | |
| 2184 | RDAGQDRAGGEEDAGCVRARGAPSEEELQDSRVYVSSL | 2221 |

### EXAMPLE 16

[0368] This Example relates to the variant HUMLVDCCB_P20 (SEQ ID NO:6; the nucleic acid sequence is given by SEQ ID NO:28), which is a variant alpha 1 subunit according to the present invention, and more specifically, is a splice variant of the known protein CCAC_HUMAN, which is encoded by the CACNA1C gene. This alpha subunit is the alpha 1C subunit, which forms the voltage-dependent L-type calcium channel. This subunit is also called the alpha subunit Cav1.2. The known protein is described in greater detail above with regard to Example 14.

[0369] The structure of the splice variant according to the present invention features truncation of the protein, as compared to the known protein sequence. An alignment is provided at the end of this section, while the comparison between the two sequences is described below.

[0370] According to preferred embodiments of the present invention, there is provided an isolated chimeric polypeptide encoding for HUMLVDCCB_P20, consisting essentially of an amino acid sequence being at least 90% homologous to (SEQ ID NO: 148) MVNENTRMYIPEENHQGSNYGSPRPAHANMNANAAAGLAPEHIPTPGAALSWQAAIDAARQAKLMGSAGNATISTVSSTQRKRQQYGKPKKQGSTTATRPPRALLCLTLKNPIRRACISIVEWKPFEIIILLTIFANCVALAIYIPFPEDDSNATNSNLERVEYLFLIIFTVEAFLKVIAYGLLFHPNAYLRNGWNLLDFIIVVVG corresponding to amino acids 1-206 of CCAC_HUMAN, which also corresponds to amino acids 1-206 of HUMLVDCCB_P20.

[0371] Domains affected by alternative splicing include the S3 transmembrane domain of domain I; the extracellular loop between S3 and S4 transmembrane domains of domain I; the S4 transmembrane domain of domain I; the extracellular loop between S4 and S5 transmembrane domains of domain I; the S5 transmembrane domain of domain I; the pore loop region between S5 and S6 transmembrane domains of domain I; the S6 transmembrane domain of domain I; the cytoplasmic loop between domain I and domain II; the S1 transmembrane domain of domain II; the extracellular loop between S1 and S2 transmembrane domains of domain II; the S2 transmembrane domain of domain II; the extracellular loop between S2 and S3 transmembrane domains of domain II; the S3 transmembrane domain of domain II; the extracellular loop between S3 and S4 transmembrane domains of domain II; the S4 transmembrane domain of domain II; the extracellular loop between S4 and S5 transmembrane domains of domain II; the S5 transmembrane domain of domain II; the pore loop region between S5 and S6 transmembrane domains of domain II; the S6 transmembrane domain of domain II; the cytoplasmic loop between domain II and domain III; the S1 transmembrane domain of domain III; the extracellular loop between S1 and S2 transmembrane domains of domain III; the S2 transmembrane domain of domain III; the extracellular loop between S2 and S3 transmembrane domains of domain III; the S3 transmembrane domain of domain III; the extracellular loop between S3 and S4 transmembrane domains of domain III; the S4 transmembrane domain of domain III; the extracellular loop between S4 and S5 transmembrane domains of domain III; the S5 transmembrane domain of domain III; the pore loop region between S5 and S6 transmembrane domains of domain III; the S6 transmembrane domain of domain III; the cytoplasmic loop between domain III and domain IV; the S1 transmembrane domain of domain IV; the extracellular loop between S1 and S2 transmembrane domains of domain IV; the S2 transmembrane domain of domain IV; the extracellular loop between S2 and S3 transmembrane domains of domain IV; the S3 transmembrane domain of domain IV; the extracellular loop between S3 and S4 transmembrane domains of domain IV; the S4 transmembrane domain of domain IV; the extracellular loop between S4 and S5 transmembrane domains of domain IV; the S5 transmembrane domain of domain IV; the pore loop region between S5 and S6 transmembrane domains of domain IV; the S6 transmembrane domain of domain IV; the cytoplasmic C-terminus region of the protein.

[0372] One domain/two-domain channels are known in the art. It was previously demonstrated for N-type Cav2.2 channels that a channel consisting of domains I and II is not functional when expressed alone but only when coexpressed with a construct forming domains III and IV. However, coexpression of these very short one or two domain isoforms with the full length channel protein markedly reduced protein quantity and current density of the full length channel. Similarly, a three-domain channel which lacked the first domain and a part of the second domain by using an alternative promotor does not produce a measurable calcium current but instead, inhibits the functional expression of the full-length form. Therefore, this type of splicing may be a mechanism to transiently down-regulate a specific calcium channel without influencing promotor regulation.

[0373] From the above description of the function of variants lacking several domains, it is expected that the variant will function as a down regulation mechanism of a known functional channel protein. This variant may optionally be used for diagnostic applications, because the presence, absence or level of such downregulation may have diagnostic implications, for example for detecting a disease and/or for selecting a therapy for the disease.

Sequence name: CCAC_HUMAN documentation:

of: HUMLVDCCB_P20 (SEQ ID NO: 6)×CCAC_HUMAN (SEQ ID NO: 149) . . .

segment 1/1:

[0374] Quality: 2006.00

Escore: 0

Matching length: 206 Total

length: 206

Matching Percent Similarity: 100.00 Matching Percent

Identity: 100.00

Total Percent Similarity: 100.00 Total Percent

Identity: 100.00

[0375] Gaps: 0

| | . . . . . | |
|---|---|---|
| 1 | MVNENTRMYIPEENHQGSNYGSPRPAHANMNANAAAGLAPEHIPTPGAAL | 50 |
| | \|\|\|\|\|\|\|\|\|\|\|\|\|\|\|\|\|\|\|\|\|\|\|\|\|\|\|\|\|\|\|\|\|\|\|\|\|\|\|\|\|\|\|\|\|\|\|\|\|\| | |
| 1 | MVNENTRMYIPEENHQGSNYGSPRPAHANMNANAAAGLAPEHIPTPGAAL | 50 |
| | . . . . . | |
| 51 | SWQAAIDAARQAKLMGSAGNATISTVSSTQRKRQQYGKPKKQGSTTATRP | 100 |
| | \|\|\|\|\|\|\|\|\|\|\|\|\|\|\|\|\|\|\|\|\|\|\|\|\|\|\|\|\|\|\|\|\|\|\|\|\|\|\|\|\|\|\|\|\|\|\|\|\|\| | |
| 51 | SWQAAIDAARQAKLMGSAGNATISTVSSTQRKRQQYGKPKKQGSTTATRP | 100 |
| | . . . . . | |
| 101 | PRALLCLTLKNPIRRACISIVEWKPFEIIILLTIFANCVALAIYIPFPED | 150 |
| | \|\|\|\|\|\|\|\|\|\|\|\|\|\|\|\|\|\|\|\|\|\|\|\|\|\|\|\|\|\|\|\|\|\|\|\|\|\|\|\|\|\|\|\|\|\|\|\|\|\| | |
| 101 | PRALLCLTLKNPIRRACISIVEWKPFEIIILLTIFANCVALAIYIPFPED | 150 |
| | . . . . . | |
| 151 | DSNATNSNLERVEYLFLIIFTVEAFLKVIAYGLLFHPNAYLRNGWNLLDF | 200 |
| | \|\|\|\|\|\|\|\|\|\|\|\|\|\|\|\|\|\|\|\|\|\|\|\|\|\|\|\|\|\|\|\|\|\|\|\|\|\|\|\|\|\|\|\|\|\|\|\|\|\| | |
| 151 | DSNATNSNLERVEYLFLIIFTVEAFLKVIAYGLLFHPNAYLRNGWNLLDF | 200 |
| 201 | IIVVVG | 206 |
| | \|\|\|\|\|\| | |
| 201 | IIVVVG | 206 |

### EXAMPLE 17

[0376] This Example relates to the variant HUMLVDCCB_P21 (SEQ ID NO:7; the nucleic acid sequence is given by SEQ ID NO:29), which is a variant alpha 1 subunit according to the present invention, and more specifically, is a splice variant of the known protein CCAC_HUMAN, which is encoded by the CACNA1C gene. This alpha subunit is the alpha 1C subunit, which forms the voltage-dependent L-type calcium channel. This subunit is also called the alpha subunit Cav1.2. The known protein is described in greater detail above with regard to Example 14.

[0377] The structure of the splice variant according to the present invention features truncation of the protein, as compared to the known protein sequence. An alignment is provided at the end of this section, while the comparison between the two sequences is described below.

[0378] According to preferred embodiments of the present invention, there is provided an isolated chimeric polypeptide encoding for HUMLVDCCB_P21, comprising a first amino acid sequence being at least 90% homologous to (SEQ ID NO: 150) MVNENTRMYIPEENHQGSNYGSPRPAHANMNANAAAGLAPEHIPTPGAALSWQAAIDAARQAKLMGSAGNATISTVSSTQRKRQQYGKPKKQGSTTATRPPRALLCLTLKNPIRRACISIVEWKPFEIIILLTIFANCVALAIYIPFPEDDSNATNSNLERVEYLFLIIFTVEAFLKVIAYGLLFHPNAYLRNGWNLLDFIIVVVGLFSAILEQATKADGANALGGKGAGFDVKALRAFRVLRPLRLVSGVPSLQVVLNSIIKAMVPLLHIALLVLFVIIIYAIIGLELFMGKMHKTCYNQEGIADVPAEDDPSPCALETGHGRQCQNGTVCKPGWDGPKHGITNFDNFAFAMLTVFQCITMEGWTDVLYWVNDAVGRDWPWIYFVTLIIIGSFFVLNLVLGVLSG corresponding to amino acids 1-406 of CCAC_HUMAN, which also corresponds to amino acids 1-406 of HUMLVDCCB_P21.

[0379] Domains affected by alternative splicing include the S3 transmembrane domain of domain I; the extracellular loop between S3 and S4 transmembrane domains of domain I; the S4 transmembrane domain of domain I; the extracellular loop between S4 and S5 transmembrane domains of domain I; the S5 transmembrane domain of domain I; the pore loop region between S5 and S6 transmembrane domains of domain I; the S6 transmembrane domain of domain I; the cytoplasmic loop between domain I and domain II; the S1 transmembrane domain of domain II; the extracellular loop between S1 and S2 transmembrane domains of domain II; the S2 transmembrane domain of domain II; the extracellular loop between S2 and S3 transmembrane domains of domain II; the S3 transmembrane domain of domain II; the extracellular loop between S3 and S4 transmembrane domains of domain II; the S4 transmembrane domain of domain II; the extracellular loop between S4 and S5 transmembrane domains of domain II; the S5 transmembrane domain of domain II; the pore loop region between S5 and S6 transmembrane domains of domain II; the S6 transmembrane domain of domain II; the cytoplasmic loop between domain II and domain III; the S1 transmembrane domain of domain III; the extracellular loop between S1 and S2 transmembrane domains of domain III; the S2 transmembrane domain of domain III; the extracellular loop between S2 and S3 transmembrane domains of domain III; the S3 transmembrane domain of domain III; the extracellular loop between S3 and S4 transmembrane domains of domain III; the S4 transmembrane domain of domain III; the extracellular loop between S4 and S5 transmembrane domains of domain III; the S5 transmembrane domain of domain III; the pore loop region between S5 and S6 transmembrane domains of domain III; the S6 transmembrane domain of domain III; the cytoplasmic loop between domain III and domain IV; the S1 transmembrane domain of domain IV; the extracellular loop between S1 and S2 transmembrane domains of domain IV; the S2 transmembrane domain of domain IV; the extracellular loop between S2 and S3 transmembrane domains of domain IV; the S3 transmembrane domain of domain IV; the extracellular loop between S3 and S4 transmembrane domains of domain IV; the S4 transmembrane domain of domain IV; the extracellular loop between S4 and S5 transmembrane domains of domain IV; the S5 transmembrane domain of domain IV; the pore loop region between S5 and S6 transmembrane domains of domain IV; the S6 transmembrane domain of domain IV; the cytoplasmic C-terminus region of the protein.

[0380] One domain/two-domain channels are known in the art. It was previously demonstrated for N-type Cav2.2 channels that a channel consisting of domains I and II is not functional when expressed alone but only when coexpressed with a construct forming domains III and IV. However, coexpression of these very short one or two domain isoforms with the full length channel protein markedly reduced protein quantity and current density of the full length channel. Similarly, a three-domain channel which lacked the first domain and a part of the second domain by using an alternative promotor does not produce a measurable calcium current but instead, inhibits the functional expression of the full-length form. Therefore, this type of splicing may be a mechanism to transiently down-regulate a specific calcium channel without influencing promotor regulation.

[0381] From the above description of the function of variants lacking several domains, it is expected that the variant will function as a down regulation mechanism of a known functional channel protein. This variant may optionally be used for diagnostic applications, because the presence, absence or level of such downregulation may have diagnostic implications, for example for detecting a disease and/or for selecting a therapy for the disease.

Sequence name: CCAC_HUMAN

documentation:

of: HUMLVDCCB_P21 (SEQ ID NO: 7)×CCAC_HUMAN (SEQ ID NO; 151) . . .

segment 1/1:

[0382] Quality: 3947.00

Escore: 0

Matching length: 406 Total

length: 406

Matching Percent Similarity: 100.00 Matching Percent

Identity: 100.00

Total Percent Similarity: 100.00 Total Percent

Identity: 100.00

[0383] Gaps: 0

| | . . . . | |
|---|---|---|
| 1 | MVNENTRMYIPEENHQGSNYGSPRPAHANMNANAAAGLAPEHIPTPGAAL | 50 |
| | \|\|\|\|\|\|\|\|\|\|\|\|\|\|\|\|\|\|\|\|\|\|\|\|\|\|\|\|\|\|\|\|\|\|\|\|\|\|\|\|\|\|\|\|\|\|\|\|\|\| | |
| 1 | MVNENTRMYIPEENHQGSNYGSPRPAHANMNANAAAGLAPEHIPTPGAAL | 50 |
| | . . . . | |
| 51 | SWQAAIDAARQAKLMGSAGNATISTVSSTQRKRQQYGKPKKQGSTTATRP | 100 |
| | \|\|\|\|\|\|\|\|\|\|\|\|\|\|\|\|\|\|\|\|\|\|\|\|\|\|\|\|\|\|\|\|\|\|\|\|\|\|\|\|\|\|\|\|\|\|\|\|\|\| | |
| 51 | SWQAAIDAARQAKLMGSAGNATISTVSSTQRKRQQYGKPKKQGSTTATRP | 100 |
| | . . . . | |
| 101 | PRALLCLTLKNPIRRACISIVEWKPFEIIILLTIFANCVALAIYIPFPED | 150 |
| | \|\|\|\|\|\|\|\|\|\|\|\|\|\|\|\|\|\|\|\|\|\|\|\|\|\|\|\|\|\|\|\|\|\|\|\|\|\|\|\|\|\|\|\|\|\|\|\|\|\| | |
| 101 | PRALLCLTLKNPIRRACISIVEWKPFEIIILLTIFANCVALAIYIPFPED | 150 |
| | . . . . | |
| 151 | DSNATNSNLERVEYLFLIIFTVEAFLKVIAYGLLFHPNAYLRNGWNLLDF | 200 |
| | \|\|\|\|\|\|\|\|\|\|\|\|\|\|\|\|\|\|\|\|\|\|\|\|\|\|\|\|\|\|\|\|\|\|\|\|\|\|\|\|\|\|\|\|\|\|\|\|\|\| | |
| 151 | DSNATNSNLERVEYLFLIIFTVEAFLKVIAYGLLFHPNAYLRNGWNLLDF | 200 |
| | . . . . | |
| 201 | IIVVVGLFSAILEQATKADGANALGGKGAGFDVKALRAFRVLRPLRLVSG | 250 |
| | \|\|\|\|\|\|\|\|\|\|\|\|\|\|\|\|\|\|\|\|\|\|\|\|\|\|\|\|\|\|\|\|\|\|\|\|\|\|\|\|\|\|\|\|\|\|\|\|\|\| | |
| 201 | IIVVVGLFSAILEQATKADGANALGGKGAGFDVKALRAFRVLRPLRLVSG | 250 |
| | . . . . | |
| 251 | VPSLQVVLNSIIKAMVPLLHIALLVLFVIIIYAIIGLELFMGKMHKTCYN | 300 |
| | \|\|\|\|\|\|\|\|\|\|\|\|\|\|\|\|\|\|\|\|\|\|\|\|\|\|\|\|\|\|\|\|\|\|\|\|\|\|\|\|\|\|\|\|\|\|\|\|\|\| | |
| 251 | VPSLQVVLNSIIKAMVPLLHIALLVLFVIIIYAIIGLELFMGKMHKTCYN | 300 |
| | . . . . | |
| 301 | QEGIADVPAEDDPSPCALETGHGRQCQNGTVCKPGWDGPKHGITNFDNFA | 350 |
| | \|\|\|\|\|\|\|\|\|\|\|\|\|\|\|\|\|\|\|\|\|\|\|\|\|\|\|\|\|\|\|\|\|\|\|\|\|\|\|\|\|\|\|\|\|\|\|\|\|\| | |
| 301 | QEGIADVPAEDDPSPCALETGHGRQCQNGTVCKPGWDGPKHGITNFDNFA | 350 |
| | . . . . | |
| 351 | FAMLTVFQCITMEGWTDVLYWVNDAVGRDWPWIYFVTLIIIGSFFVLNLV | 400 |
| | \|\|\|\|\|\|\|\|\|\|\|\|\|\|\|\|\|\|\|\|\|\|\|\|\|\|\|\|\|\|\|\|\|\|\|\|\|\|\|\|\|\|\|\|\|\|\|\|\|\| | |
| 351 | FAMLTVFQCITMEGWTDVLYWVNDAVGRDWPWIYFVTLIIIGSFFVLNLV | 400 |
| 401 | LGVLSG | 406 |
| | \|\|\|\|\|\| | |
| 401 | LGVLSG | 406 |

### EXAMPLE 18

[0384] This Example relates to the variant HUMLVDCCB_P13 (SEQ ID NO:8; the nucleic acid sequence is given by SEQ ID NO:30), which is a variant alpha 1 subunit according to the present invention, and more specifically, is a splice variant of the known protein CCAC_HUMAN, which is encoded by the CACNA1C gene. This alpha subunit is the alpha 1C subunit, which forms the voltage-dependent L-type calcium channel. This subunit is also called the alpha subunit Cav1.2. The known protein is described in greater detail above with regard to Example 14.

[0385] The structure of the splice variant according to the present invention features truncation of the protein, as compared to the known protein sequence. An alignment is provided at the end of this section, while the comparison between the two sequences is described below.

[0386] According to preferred embodiments of the present invention, there is provided an isolated chimeric polypeptide encoding for HUMLVDCCB_P13, comprising a first amino acid sequence being at least 90% homologous to (SEQ ID NO: 152) MVNENTRMYIPEENHQGSNYGSPRPAHANMNANAAAGLAPEHIPTPGAALSWQAAIDAARQAKLMGSAGNATISTVSSTQRKRQQYGKPKKQGSTTATRPPRALLCLTLKNPIRRACISIVEWKPFEIIILLTIFANCVALAIYIPFPEDDSNATNSNLERVEYLFLIIFTVEAFLKVIAYGLLFHPNAYLRNGWNLLDFIIVVVGLFSAILEQATKADGANALGGKGAGFDVKALRAFRVLRPLRLVSGVPSLQVVLNSIIKAMVPLLHIALLVLFVIIIYAIIGLELFMGKMHKTCYNQEGIADVPAEDDPSPCALETGHGRQCQNGTVCKPGWDGPKHGITNFDNFAFAMLTVFQCITMEGWTDVLYWVNDAVGRDWPWIYFVTLIIIGSFFVLNLVLGVLSGEFSKEREKAKARGDFQKLREKQQLEEDLKGYLDWITQAEDIDPENEDEGMDEEKPRN corresponding to amino acids 1-463 of CCAC_HUMAN, which also corresponds to amino acids 1-463 of HUMLVDCCB_P13, a second amino acid sequence being at least 70%, optionally at least 80%, preferably at least 85%, more preferably at least 90% and most preferably at least 95% homologous to a polypeptide having the sequence (SEQ ID NO: 153) RGTPAGMLDQKKGKFAWFSHSTETHV corresponding to amino acids 464-489 of HUMLVDCCB_P13, a third amino acid sequence being at least 90% homologous to (SEQ ID NO: 154) SMPTSETESVNTENVAGGDIEGENCGARLAHRISKSKFSRYWRRWNRFCRRKCRAAVKSNVFYWLVIFLVFLNTLTIASEHYNQPNWLTEVQDTANKALLALFTAEMLLKMYSLGLQAYFVSLFNRFDCFVVCGGILETILVETKIMSPLGISVLRCVRLLRIFKITRYWNSLSNLVASLLNSVRSIASLLLLLFLFIIIFSLLGMQLFGGKFNFDEMQTRRSTFDNFPQSLLTVFQILTGEDWNSVMYDGIMAYGGPSFPGMLVCIYFIILFICGNYILLNVFLAIAVDNLADAESLTSAQKEEEEEKERKKLARTASPEKKQELVEKPAVGESKEEKIELKSITADGESPPATKINMDDLQPNENEDKSPYPNPETTGEEDEEEPEMPVGPRPRPLSELHLKEKAVPMPEASAFFIFSSNNRFRLQCHRIVNDTIFTNLILFFILLSSISLAAEDPVQHTSFRNHILFYFDIVFTTIFTIEI A corresponding to amino acids 465-949 of CCAC_HUMAN, which also corresponds to amino acids 490-974 of HUMLVDCCB_P13, a fourth amino acid sequence being at least 90% homologous to (SEQ ID NO: 155) LKMTAYGAFLHKGSFCRNYFNILDLLVVSVSLISFGIQSSAINVVKILRVLRVLRPLRAINRAKGLKHVVQCVFVAIRTIGNIVIVTTLLQFMFACIGVQLFKGKLYTCSDSSKQTEAECKGNYITYKDGEVDHPIIQPRSWENSKFDFDNVLAAMMALFTVSTFEGWPELLYRSIDSHTEDKGPIYNYRVEISIFFIIYIIIIAFFMMNIFVGFVIVTFQEQGEQEYKNCELDKNQRQCVEYALKARPLRRYIPKNQHQYKVWYVVNSTYFEYLMFVLILLNTICLAMQHYGQSCLFKIAMNILNMLFTGLFTVEMILKLIAFKPK corresponding to amino acids 970-1296 of CCAC_HUMAN, which also corresponds to amino acids 975-1301 of HUMLVDCCB_P13, a fifth amino acid sequence being at least 90% homologous to (SEQ ID NO: 156) HYFCDAWNTFDALIVVGSIVDIAITEVNPAEHTQCSPSMNAEENSRISITFFRLFRVMRLVKLLSRGEGIRTLLWTFIKSFQALPYVALLIVMLFFIYAVIGMQVFGKIALNDTTEINRNNNFQTFPQAVLLLFRCATGEAWQDIMLACMPGKKCAPESEPSNSTEGETPCGSSFAVFYFISFYMLCAFLIINLFVAVIMDNFDYLTRDWSILGPHHLDEFKRIWAEYDPEAKGRIKHLDVVTLLRRIQPPLGFGKLCPHRVACKRLVSMNMPLNSDGTVMFNATLFALVRTALRIKTE corresponding to amino acids 1325-1623 of CCAC_HUMAN, which also corresponds to amino acids 1302-1600 of HUMLVDCCB_P13, a sixth amino acid sequence being at least 70%, optionally at least 80%, preferably at least 85%, more preferably at least 90% and most preferably at least 95% homologous to a polypeptide having the sequence (SEQ ID NO: 157) EGPSPSEAHQGAEDPFRPA corresponding to amino acids 1601-1619 of HUMLVDCCB_P113, a seventh amino acid sequence being at least 90% homologous to (SEQ ID NO: 158) GNLEQANEELRAIIKKIWKRTSMKLLDQVVPPAGDDEVTVGKFYATFLIQEYFRKFKKRKEQGLVGKPSQRNALSLQAGLRTLHDIGPEIRRAISGDLTAEEELDKAMKEAVSAASEDDIFRRAGGLFGNHVSYYQSDGRSAFPQTFTTQRPLHINKAGSSQGDTESPSHEKLVDSTFTPSSYSSTGSNANINNANNTALGRLPRPAGYPSTVSTVEGHGPPLSPAIRVQEVAWKLSSN corresponding to amino acids 1624-1862 of CCAC_HUMAN, which also corresponds to amino acids 1620-1858 of HUMLVDCCB_P13, a eight amino acid sequence being at least 90% homologous to (SEQ ID NO: 159) RCHSRESQAAMAGQEETSQDETYEVKMNHDTEACSEPSLLSTEMLSYQDDENRQLTLPEEDKRDIRQSPKRGFLRSASLGRRASFHLECLKRQKDRGGDISQKTVLPLHLVHHQALAVAGLSPLLQRSHSPASFPRPFATPPATPGSRGWPPQPVPTLRLEGVESSEKLNSSFPSIHCGSWAETTPGGGGSSAARRVRPVSLMVPSQAGAPGRQFHGSASSLVEAVLISEGLGQFAQDPKFIEVTTQELADACDMTIEEMESAADNILSGGAPQSPNGALLPFVNCRDAGQDRAGGEEDAGCVRARGAPSEEELQDSRVYVSSL corresponding to amino acids 1898-2221 of CCAC_HUMAN, which also corresponds to amino acids 1859-2182 of HUMLVDCCB_P13, wherein said first amino acid sequence, second amino acid sequence, third amino acid sequence, fourth amino acid sequence, fifth amino acid sequence, sixth amino acid sequence, seventh amino acid sequence and eight amino acid sequence are contiguous and in a sequential order.

[0387] According to preferred embodiments of the present invention, there is provided an isolated polypeptide encoding for an edge portion of HUMLVDCCB_P13, comprising an amino acid sequence being at least 70%, optionally at least about 80%, preferably at least about 85%, more preferably at least about 90% and most preferably at least about 95% homologous to the sequence encoding for (SEQ ID NO: 160) RGTPAGMLDQKKGKFAWFSHSTETHV, corresponding to HUMLVDCCB_P13.

[0388] According to preferred embodiments of the present invention, there is provided an bridge portion of HUMLVDCCB_P13, comprising a polypeptide having a length “n”, wherein n is at least about 10 amino acids in length, optionally at least about 20 amino acids in length, preferably at least about 30 amino acids in length, more preferably at least about 40 amino acids in length and most preferably at least about 50 amino acids in length, wherein at least two amino acids comprise NR, having a structure as follows (numbering according to HUMLVDCCB_P13): a sequence starting from any of amino acid numbers 463−x to 463; and ending at any of amino acid numbers 464+((n−2)−x), in which x varies from 0 to n−2.

[0389] According to preferred embodiments of the present invention, there is provided an isolated chimeric polypeptide encoding for an edge portion of HUMLVDCCB_P13, comprising a polypeptide having a length “n”, wherein n is at least about 10 amino acids in length, optionally at least about 20 amino acids in length, preferably at least about 30 amino acids in length, more preferably at least about 40 amino acids in length and most preferably at least about 50 amino acids in length, wherein at least two amino acids comprise AL, having a structure as follows: a sequence starting from any of amino acid numbers 974−x to 974; and ending at any of amino acid numbers 975+((n−2)−x), in which x varies from 0 to n−2.

[0390] According to preferred embodiments of the present invention, there is provided an isolated chimeric polypeptide encoding for an edge portion of HUMLVDCCB_P113, comprising a polypeptide having a length “n”, wherein n is at least about 10 amino acids in length, optionally at least about 20 amino acids in length, preferably at least about 30 amino acids in length, more preferably at least about 40 amino acids in length and most preferably at least about 50 amino acids in length, wherein at least two amino acids comprise KH, having a structure as follows: a sequence starting from any of amino acid numbers 1301−x to 1301; and ending at any of amino acid numbers 1302+((n−2)−x), in which x varies from 0 to n−2.

[0391] According to preferred embodiments of the present invention, there is provided an isolated polypeptide encoding for an edge portion of HUMLVDCCB_P13, comprising an amino acid sequence being at least 70%, optionally at least about 80%, preferably at least about 85%, more preferably at least about 90% and most preferably at least about 95% homologous to the sequence encoding for (SEQ ID NO: 161) EGPSPSEAHQGAEDPFRPA, corresponding to HUMLVDCCB_P13.

[0392] According to preferred embodiments of the present invention, there is provided an isolated chimeric polypeptide encoding for an edge portion of HUMLVDCCB_P13, comprising a polypeptide having a length “n”, wherein n is at least about 10 amino acids in length, optionally at least about 20 amino acids in length, preferably at least about 30 amino acids in length, more preferably at least about 40 amino acids in length and most preferably at least about 50 amino acids in length, wherein at least two amino acids comprise NR, having a structure as follows: a sequence starting from any of amino acid numbers 1858−x to 1858; and ending at any of amino acid numbers 1859+((n−2)−x), in which x varies from 0 to n−2.

[0393] 1. Domains affected by alternative splicing include: the cytoplasmic loop between domain I and domain II; the S2 transmembrane domain of domain III; the extracellular loop between S2 and S3 transmembrane domains of domain III; the extracellular loop between S2 and S3 transmembrane domains of domain IV; the S3 transmembrane domain of domain IV; the extracellular loop between S3 and S4 transmembrane domains of domain IV the cytoplasmic C-terminus region of the protein.

[0394] The potential effect of these changes is described with regard to Example 14 above.

[0395] From the above description of the effect of changes to the C-terminus domain of this variant, it is expected that the variant will have greater current amplitude as compared to the known protein and a stronger calcium dependence of inactivation. It is also expected to modulate the Ca+2 dependent inactivation of the channel.

[0396] In addition, the changes in the S2 transmembrane domain of domain III might influence the voltage-dependent action of dihydropyridines.

Sequence name: CCAC_HUMAN

documentation:

of: HUMLVDCCB_P13 (SEQ ID NO: 8)×CCAC_HUMAN (SEQ ID NO: 162) . . . segment 1/1:

[0397] Quality: 20374.00

Escore: 0

Matching lenght: 2138 Total

length: 2265

Matching Percent Similarity: 100.00 Matching Percent

Identity: 99.95

Total Percent Similarity: 94.39 Total Percent

Identity: 94.35

[0398] Gaps:

| | . . . . | |
|---|---|---|
| 1 | MVNENTRMYIPEENHQGSNYGSPRPAHANMNANAAAGLAPEHIPTPGAAL | 50 |
| | \|\|\|\|\|\|\|\|\|\|\|\|\|\|\|\|\|\|\|\|\|\|\|\|\|\|\|\|\|\|\|\|\|\|\|\|\|\|\|\|\|\|\|\|\|\|\|\|\|\| | |
| 1 | MVNENTRMYIPEENHQGSNYGSPRPAHANMNANAAAGLAPEHIPTPGAAL | 50 |
| | . . . . | |
| 51 | SWQAAIDAARQAKLMGSAGNATISTVSSTQRKRQQYGKPKKQGSTTATRP | 100 |
| | \|\|\|\|\|\|\|\|\|\|\|\|\|\|\|\|\|\|\|\|\|\|\|\|\|\|\|\|\|\|\|\|\|\|\|\|\|\|\|\|\|\|\|\|\|\|\|\|\|\| | |
| 51 | SWQAAIDAARQAKLMGSAGNATISTVSSTQRKRQQYGKPKKQGSTTATRP | 100 |
| | . . . . | |
| 101 | PRALLCLTLKNPIRRACISIVEWKPFEIIILLTIFANCVALAIYIPFPED | 150 |
| | \|\|\|\|\|\|\|\|\|\|\|\|\|\|\|\|\|\|\|\|\|\|\|\|\|\|\|\|\|\|\|\|\|\|\|\|\|\|\|\|\|\|\|\|\|\|\|\|\|\| | |
| 101 | PRALLCLTLKNPIRRACISIVEWKPFEIIILLTIFANCVALAIYIPFPED | 150 |
| | . . . . | |
| 151 | DSNATNSNLERVEYLFLIIFTVEAFLKVIAYGLLFHPNAYLRNGWNLLDF | 200 |
| | \|\|\|\|\|\|\|\|\|\|\|\|\|\|\|\|\|\|\|\|\|\|\|\|\|\|\|\|\|\|\|\|\|\|\|\|\|\|\|\|\|\|\|\|\|\|\|\|\|\| | |
| 151 | DSNATNSNLERVEYLFLIIFTVEAFLKVIAYGLLFHPNAYLRNGWNLLDF | 200 |
| | . . . . | |
| 201 | IIVVVGLFSAILEQATKADGANALGGKGAGFDVKALRAFRVLRPLRLVSG | 250 |
| | \|\|\|\|\|\|\|\|\|\|\|\|\|\|\|\|\|\|\|\|\|\|\|\|\|\|\|\|\|\|\|\|\|\|\|\|\|\|\|\|\|\|\|\|\|\|\|\|\|\| | |
| 201 | IIVVVGLFSAILEQATKADGANALGGKGAGFDVKALRAFRVLRPLRLVSG | 250 |
| | . . . . | |
| 251 | VPSLQVVLNSIIKAMVPLLHIALLVLFVIIIYAIIGLELFMGKMHKTCYN | 300 |
| | \|\|\|\|\|\|\|\|\|\|\|\|\|\|\|\|\|\|\|\|\|\|\|\|\|\|\|\|\|\|\|\|\|\|\|\|\|\|\|\|\|\|\|\|\|\|\|\|\|\| | |
| 251 | VPSLQVVLNSIIKAMVPLLHIALLVLFVIIIYAIIGLELFMGKMHKTCYN | 300 |
| | . . . . | |
| 301 | QEGIADVPAEDDPSPCALETGHGRQCQNGTVCKPGWDGPKHGITNFDNFA | 350 |
| | \|\|\|\|\|\|\|\|\|\|\|\|\|\|\|\|\|\|\|\|\|\|\|\|\|\|\|\|\|\|\|\|\|\|\|\|\|\|\|\|\|\|\|\|\|\|\|\|\|\| | |
| 301 | QEGIADVPAEDDPSPCALETGHGRQCQNGTVCKPGWDGPKHGITNFDNFA | 350 |
| | . . . . | |
| 351 | FAMLTVFQCITMEGWTDVLYWVNDAVGRDWPWIYFVTLIIIGSFFVLNLV | 400 |
| | \|\|\|\|\|\|\|\|\|\|\|\|\|\|\|\|\|\|\|\|\|\|\|\|\|\|\|\|\|\|\|\|\|\|\|\|\|\|\|\|\|\|\|\|\|\|\|\|\|\| | |
| 351 | FAMLTVFQCITMEGWTDVLYWVNDAVGRDWPWIYFVTLIIIGSFFVLNLV | 400 |
| | . . . . | |
| 401 | LGVLSGEFSKEREKAKARGDFQKLREKQQLEEDLKGYLDWITQAEDIDPE | 450 |
| | \|\|\|\|\|\|\|\|\|\|\|\|\|\|\|\|\|\|\|\|\|\|\|\|\|\|\|\|\|\|\|\|\|\|\|\|\|\|\|\|\|\|\|\|\|\|\|\|\|\| | |
| 401 | LGVLSGEFSKEREKAKARGDFQKLREKQQLEEDLKGYLDWITQAEDIDPE | 450 |
| | . . . . | |
| 451 | NEDEGMDEEKPRNRGTPAGMLDQKKGKFAWFSHSTETHVSMPTSETESVN | 500 |
| | \|\|\|\|\|\|\|\|\|\|\|\|\| :\|\|\|\|\|\|\|\|\|\|\| | |
| 451 | NEDEGMDEEKPRN.........................MSMPTSETESVN | 475 |
| | . . . . | |
| 501 | TENVAGGDIEGENCGARLAHRISKSKFSRYWRRWNRFCRRKCRAAVKSNV | 550 |
| | \|\|\|\|\|\|\|\|\|\|\|\|\|\|\|\|\|\|\|\|\|\|\|\|\|\|\|\|\|\|\|\|\|\|\|\|\|\|\|\|\|\|\|\|\|\|\|\|\|\| | |
| 476 | TENVAGGDIEGENCGARLAHRISKSKFSRYWRRWNRFCRRKCRAAVKSNV | 525 |
| | . . . . | |
| 551 | FYWLVIFLVFLNTLTIASEHYNQPNWLTEVQDTANKALLALFTAEMLLKM | 600 |
| | \|\|\|\|\|\|\|\|\|\|\|\|\|\|\|\|\|\|\|\|\|\|\|\|\|\|\|\|\|\|\|\|\|\|\|\|\|\|\|\|\|\|\|\|\|\|\|\|\|\| | |
| 526 | FYWLVIFLVFLNTLTIASEHYNQPNWLTEVQDTANKALLALFTAEMLLKM | 575 |
| | . . . . | |
| 601 | YSLGLQAYFVSLFNRFDCFVVCGGILETILVETKIMSPLGISVLRCVRLL | 650 |
| | \|\|\|\|\|\|\|\|\|\|\|\|\|\|\|\|\|\|\|\|\|\|\|\|\|\|\|\|\|\|\|\|\|\|\|\|\|\|\|\|\|\|\|\|\|\|\|\|\|\| | |
| 576 | YSLGLQAYFVSLFNRFDCFVVCGGILETILVETKIMSPLGISVLRCVRLL | 625 |
| | . . . . | |
| 651 | RIFKITRYWNSLSNLVASLLNSVRSIASLLLLLFLFIIIFSLLGMQLFGG | 700 |
| | \|\|\|\|\|\|\|\|\|\|\|\|\|\|\|\|\|\|\|\|\|\|\|\|\|\|\|\|\|\|\|\|\|\|\|\|\|\|\|\|\|\|\|\|\|\|\|\|\|\| | |
| 626 | RIFKITRYWNSLSNLVASLLNSVRSIASLLLLLFLFIIIFSLLGMQLFGG | 675 |
| | . . . . | |
| 701 | KFNFDEMQTRRSTFDNFPQSLLTVFQILTGEDWNSVMYDGIMAYGGPSFP | 750 |
| | \|\|\|\|\|\|\|\|\|\|\|\|\|\|\|\|\|\|\|\|\|\|\|\|\|\|\|\|\|\|\|\|\|\|\|\|\|\|\|\|\|\|\|\|\|\|\|\|\|\| | |
| 676 | KFNFDEMQTRRSTFDNFPQSLLTVFQILTGEDWNSVMYDGIMAYGGPSFP | 725 |
| | . . . . | |
| 751 | GMLVCIYFIILFICGNYILLNVFLAIAVDNLADAESLTSAQKEEEEEKER | 800 |
| | \|\|\|\|\|\|\|\|\|\|\|\|\|\|\|\|\|\|\|\|\|\|\|\|\|\|\|\|\|\|\|\|\|\|\|\|\|\|\|\|\|\|\|\|\|\|\|\|\|\| | |
| 726 | GMLVCIYFIILFICGNYILLNVFLAIAVDNLADAESLTSAQKEEEEEKER | 775 |
| | . . . . | |
| 801 | KKLARTASPEKKQELVEKPAVGESKEEKIELKSITADGESPPATKINMDD | 850 |
| | \|\|\|\|\|\|\|\|\|\|\|\|\|\|\|\|\|\|\|\|\|\|\|\|\|\|\|\|\|\|\|\|\|\|\|\|\|\|\|\|\|\|\|\|\|\|\|\|\|\| | |
| 776 | KKLARTASPEKKQELVEKPAVGESKEEKIELKSITADGESPPATKINMDD | 825 |
| | . . . . | |
| 851 | LQPNENEDKSPYPNPETTGEEDEEEPEMPVGPRPRPLSELHLKEKAVPMP | 900 |
| | \|\|\|\|\|\|\|\|\|\|\|\|\|\|\|\|\|\|\|\|\|\|\|\|\|\|\|\|\|\|\|\|\|\|\|\|\|\|\|\|\|\|\|\|\|\|\|\|\|\| | |
| 826 | LQPNENEDKSPYPNPETTGEEDEEEPEMPVGPRPRPLSELHLKEKAVPMP | 875 |
| | . . . . | |
| 901 | EASAFFIFSSNNRFRLQCHRIVNDTIFTNLILFFILLSSISLAAEDPVQH | 950 |
| | \|\|\|\|\|\|\|\|\|\|\|\|\|\|\|\|\|\|\|\|\|\|\|\|\|\|\|\|\|\|\|\|\|\|\|\|\|\|\|\|\|\|\|\|\|\|\|\|\|\| | |
| 876 | EASAFFIFSSNNRFRLQCHRIVNDTIFTNLILFFILLSSISLAAEDPVQH | 925 |
| | . . . . | |
| 951 | TSFRNHILFYFDIVFTTIFTIEIA....................LKMTAY | 980 |
| | \|\|\|\|\|\|\|\|\|\|\|\|\|\|\|\|\|\|\|\|\|\|\|\| \|\|\|\|\|\| | |
| 926 | TSFRNHILFYFDIVFTTIFTIEIALKILGNADYVFTSIFTLEIILKMTAY | 975 |
| | . . . . | |
| 981 | GAFLHKGSFCRNYFNILDLLVVSVSLISFGIQSSAINVVKILRVLRVLRP | 1030 |
| | \|\|\|\|\|\|\|\|\|\|\|\|\|\|\|\|\|\|\|\|\|\|\|\|\|\|\|\|\|\|\|\|\|\|\|\|\|\|\|\|\|\|\|\|\|\|\|\|\|\| | |
| 976 | GAFLHKGSFCRNYFNILDLLVVSVSLISFGIQSSAINVVKILRVLRVLRP | 1025 |
| | . . . . | |
| 1031 | LRAINRAKGLKHVVQCVFVAIRTIGNIVIVTTLLQFMFACIGVQLFKGKL | 1080 |
| | \|\|\|\|\|\|\|\|\|\|\|\|\|\|\|\|\|\|\|\|\|\|\|\|\|\|\|\|\|\|\|\|\|\|\|\|\|\|\|\|\|\|\|\|\|\|\|\|\|\| | |
| 1026 | LRAINRAKGLKHVVQCVFVAIRTIGNIVIVTTLLQFMFACIGVQLFKGKL | 1075 |
| | . . . . | |
| 1081 | YTCSDSSKQTEAECKGNYITYKDGEVDHPIIQPRSWENSKFDFDNVLAAM | 1130 |
| | \|\|\|\|\|\|\|\|\|\|\|\|\|\|\|\|\|\|\|\|\|\|\|\|\|\|\|\|\|\|\|\|\|\|\|\|\|\|\|\|\|\|\|\|\|\|\|\|\|\| | |
| 1076 | YTCSDSSKQTEAECKGNYITYKDGEVDHPIIQPRSWENSKFDFDNVLAAM | 1125 |
| | . . . . | |
| 1131 | MALFTVSTFEGWPELLYRSIDSHTEDKGPIYNYRVEISIFFIIYIIIIAF | 1180 |
| | \|\|\|\|\|\|\|\|\|\|\|\|\|\|\|\|\|\|\|\|\|\|\|\|\|\|\|\|\|\|\|\|\|\|\|\|\|\|\|\|\|\|\|\|\|\|\|\|\|\| | |
| 1126 | MALFTVSTFEGWPELLYRSIDSHTEDKGPIYNYRVEISIFFIIYIIIIAF | 1175 |
| | . . . . | |
| 1181 | FMMNIFVGFVIVTFQEQGEQEYKNCELDKNQRQCVEYALKARPLRRYIPK | 1230 |
| | \|\|\|\|\|\|\|\|\|\|\|\|\|\|\|\|\|\|\|\|\|\|\|\|\|\|\|\|\|\|\|\|\|\|\|\|\|\|\|\|\|\|\|\|\|\|\|\|\|\| | |
| 1176 | FMMNIFVGFVIVTFQEQGEQEYKNCELDKNQRQCVEYALKARPLRRYIPK | 1225 |
| | . . . . | |
| 1231 | NQHQYKVWYVVNSTYFEYLMFVLILLNTICLAMQHYGQSCLFKIAMNILN | 1280 |
| | \|\|\|\|\|\|\|\|\|\|\|\|\|\|\|\|\|\|\|\|\|\|\|\|\|\|\|\|\|\|\|\|\|\|\|\|\|\|\|\|\|\|\|\|\|\|\|\|\|\| | |
| 1226 | NQHQYKVWYVVNSTYFEYLMFVLILLNTICLAMQHYGQSCLFKIAMNILN | 1275 |
| | . . . . | |
| 1281 | MLFTGLFTVEMILKLIAFKPK............................H | 1302 |
| | \|\|\|\|\|\|\|\|\|\|\|\|\|\|\|\|\|\|\|\|\| \| | |
| 1276 | MLFTGLFTVEMILKLIAFKPKGYFSDPWNVFDFLIVIGSIIDVILSETNH | 1325 |
| | . . . . | |
| 1303 | YFCDAWNTFDALIVVGSIVDIAITEVNPAEHTQCSPSMNAEENSRISITF | 1352 |
| | \|\|\|\|\|\|\|\|\|\|\|\|\|\|\|\|\|\|\|\|\|\|\|\|\|\|\|\|\|\|\|\|\|\|\|\|\|\|\|\|\|\|\|\|\|\|\|\|\|\| | |
| 1326 | YFCDAWNTFDALIVVGSIVDIAITEVNPAEHTQCSPSMNAEENSRISITF | 1375 |
| | . . . . | |
| 1353 | FRLFRVMRLVKLLSRGEGIRTLLWTFIKSFQALPYVALLIVMLFFIYAVI | 1402 |
| | \|\|\|\|\|\|\|\|\|\|\|\|\|\|\|\|\|\|\|\|\|\|\|\|\|\|\|\|\|\|\|\|\|\|\|\|\|\|\|\|\|\|\|\|\|\|\|\|\|\| | |
| 1376 | FRLFRVMRLVKLLSRGEGIRTLLWTFIKSFQALPYVALLIVMLFFIYAVI | 1425 |
| | . . . . | |
| 1403 | GMQVFGKIALNDTTEINRNNNFQTFPQAVLLLFRCATGEAWQDIMLACMP | 1452 |
| | \|\|\|\|\|\|\|\|\|\|\|\|\|\|\|\|\|\|\|\|\|\|\|\|\|\|\|\|\|\|\|\|\|\|\|\|\|\|\|\|\|\|\|\|\|\|\|\|\|\| | |
| 1426 | GMQVFGKIALNDTTEINRNNNFQTFPQAVLLLFRCATGEAWQDIMLACMP | 1475 |
| | . . . . | |
| 1453 | GKKCAPESEPSNSTEGETPCGSSFAVFYFISFYMLCAFLIINLFVAVIMD | 1502 |
| | \|\|\|\|\|\|\|\|\|\|\|\|\|\|\|\|\|\|\|\|\|\|\|\|\|\|\|\|\|\|\|\|\|\|\|\|\|\|\|\|\|\|\|\|\|\|\|\|\|\| | |
| 1476 | GKKCAPESEPSNSTEGETPCGSSFAVFYFISFYMLCAFLIINLFVAVIMD | 1525 |
| | . . . . | |
| 1503 | NFDYLTRDWSILGPHHLDEFKRIWAEYDPEAKGRIKHLDVVTLLRRIQPP | 1552 |
| | \|\|\|\|\|\|\|\|\|\|\|\|\|\|\|\|\|\|\|\|\|\|\|\|\|\|\|\|\|\|\|\|\|\|\|\|\|\|\|\|\|\|\|\|\|\|\|\|\|\| | |
| 1526 | NFDYLTRDWSILGPHHLDEFKRIWAEYDPEAKGRIKHLDVVTLLRRIQPP | 1575 |
| | . . . . | |
| 1553 | LGFGKLCPHRVACKRLVSMNMPLNSDGTVMFNATLFALVRTALRIKTEEG | 1602 |
| | \|\|\|\|\|\|\|\|\|\|\|\|\|\|\|\|\|\|\|\|\|\|\|\|\|\|\|\|\|\|\|\|\|\|\|\|\|\|\|\|\|\|\|\|\|\|\|\| | |
| 1576 | LGFGKLCPHRVACKRLVSMNMPLNSDGTVMFNATLFALVRTALRIKTE.. | 1623 |
| | . . . . | |
| 1603 | PSPSEAHQGAEDPFRPAGNLEQANEELRAIIKKIWKRTSMKLLDQVVPPA | 1652 |
| | \|\|\|\|\|\|\|\|\|\|\|\|\|\|\|\|\|\|\|\|\|\|\|\|\|\|\|\|\|\|\|\|\| | |
| 1624 | .................GNLEQANEELRAIIKKIWKRTSMKLLDQVVPPA | 1656 |
| | . . . . | |
| 1653 | GDDEVTVGKFYATFLIQEYFRKFKKRKEQGLVGKPSQRNALSLQAGLRTL | 1702 |
| | \|\|\|\|\|\|\|\|\|\|\|\|\|\|\|\|\|\|\|\|\|\|\|\|\|\|\|\|\|\|\|\|\|\|\|\|\|\|\|\|\|\|\|\|\|\|\|\|\|\| | |
| 1657 | GDDEVTVGKFYATFLIQEYFRKFKKRKEQGLVGKPSQRNALSLQAGLRTL | 1706 |
| | . . . . | |
| 1703 | HDIGPEIRRAISGDLTAEEELDKAMKEAVSAASEDDIFRRAGGLFGNHVS | 1752 |
| | \|\|\|\|\|\|\|\|\|\|\|\|\|\|\|\|\|\|\|\|\|\|\|\|\|\|\|\|\|\|\|\|\|\|\|\|\|\|\|\|\|\|\|\|\|\|\|\|\|\| | |
| 1707 | HDIGPEIRRAISGDLTAEEELDKAMKEAVSAASEDDIFRRAGGLFGNHVS | 1756 |
| | . . . . | |
| 1753 | YYQSDGRSAFPQTFTTQRPLHINKAGSSQGDTESPSHEKLVDSTFTPSSY | 1802 |
| | \|\|\|\|\|\|\|\|\|\|\|\|\|\|\|\|\|\|\|\|\|\|\|\|\|\|\|\|\|\|\|\|\|\|\|\|\|\|\|\|\|\|\|\|\|\|\|\|\|\| | |
| 1757 | YYQSDGRSAFPQTFTTQRPLHINKAGSSQGDTESPSHEKLVDSTFTPSSY | 1806 |
| | . . . . | |
| 1803 | SSTGSNANINNANNTALGRLPRPAGYPSTVSTVEGHGPPLSPAIRVQEVA | 1852 |
| | \|\|\|\|\|\|\|\|\|\|\|\|\|\|\|\|\|\|\|\|\|\|\|\|\|\|\|\|\|\|\|\|\|\|\|\|\|\|\|\|\|\|\|\|\|\|\|\|\|\| | |
| 1807 | SSTGSNANINNANNTALGRLPRPAGYPSTVSTVEGHGPPLSPAIRVQEVA | 1856 |
| | . . . . | |
| 1853 | WKLSSN...................................RCHSRESQA | 1867 |
| | \|\|\|\|\|\| \|\|\|\|\|\|\|\|\| | |
| 1857 | WKLSSNRERHVPVCEDLELRRDSGSAGTQAHCLLLRRANPSRCHSRESQA | 1906 |
| | . . . . | |
| 1868 | AMAGQEETSQDETYEVKMNHDTEACSEPSLLSTEMLSYQDDENRQLTLPE | 1917 |
| | \|\|\|\|\|\|\|\|\|\|\|\|\|\|\|\|\|\|\|\|\|\|\|\|\|\|\|\|\|\|\|\|\|\|\|\|\|\|\|\|\|\|\|\|\|\|\|\|\|\| | |
| 1907 | AMAGQEETSQDETYEVKMNHDTEACSEPSLLSTEMLSYQDDENRQLTLPE | 1956 |
| | . . . . | |
| 1918 | EDKRDIRQSPKRGFLRSASLGRRASFHLECLKRQKDRGGDISQKTVLPLH | 1967 |
| | \|\|\|\|\|\|\|\|\|\|\|\|\|\|\|\|\|\|\|\|\|\|\|\|\|\|\|\|\|\|\|\|\|\|\|\|\|\|\|\|\|\|\|\|\|\|\|\|\|\| | |
| 1957 | EDKRDIRQSPKRGFLRSASLGRRASFHLECLKRQKDRGGDISQKTVLPLH | 2006 |
| | . . . . | |
| 1968 | LVHHQALAVAGLSPLLQRSHSPASFPRPFATPPATPGSRGWPPQPVPTLR | 2017 |
| | \|\|\|\|\|\|\|\|\|\|\|\|\|\|\|\|\|\|\|\|\|\|\|\|\|\|\|\|\|\|\|\|\|\|\|\|\|\|\|\|\|\|\|\|\|\|\|\|\|\| | |
| 2007 | LVHHQALAVAGLSPLLQRSHSPASFPRPFATPPATPGSRGWPPQPVPTLR | 2056 |
| | . . . . | |
| 2018 | LEGVESSEKLNSSFPSIHCGSWAETTPGGGGSSAARRVRPVSLMVPSQAG | 2067 |
| | \|\|\|\|\|\|\|\|\|\|\|\|\|\|\|\|\|\|\|\|\|\|\|\|\|\|\|\|\|\|\|\|\|\|\|\|\|\|\|\|\|\|\|\|\|\|\|\|\|\| | |
| 2057 | LEGVESSEKLNSSFPSIHCGSWAETTPGGGGSSAARRVRPVSLMVPSQAG | 2106 |
| | . . . . | |
| 2068 | APGRQFHGSASSLVEAVLISEGLGQFAQDPKFIEVTTQELADACDMTIEE | 2117 |
| | \|\|\|\|\|\|\|\|\|\|\|\|\|\|\|\|\|\|\|\|\|\|\|\|\|\|\|\|\|\|\|\|\|\|\|\|\|\|\|\|\|\|\|\|\|\|\|\|\|\| | |
| 2107 | APGRQFHGSASSLVEAVLISEGLGQFAQDPKFIEVTTQELADACDMTIEE | 2156 |
| | . . . . | |
| 2118 | MESAADNILSGGAPQSPNGALLPFVNCRDAGQDRAGGEEDAGCVRARGAP | 2167 |
| | \|\|\|\|\|\|\|\|\|\|\|\|\|\|\|\|\|\|\|\|\|\|\|\|\|\|\|\|\|\|\|\|\|\|\|\|\|\|\|\|\|\|\|\|\|\|\|\|\|\| | |
| 2157 | MESAADNILSGGAPQSPNGALLPFVNCRDAGQDRAGGEEDAGCVRARGAP | 2206 |
| | . | |
| 2168 | SEEELQDSRVYVSSL | 2182 |
| | \|\|\|\|\|\|\|\|\|\|\|\|\|\|\| | |
| 2207 | SEEELQDSRVYVSSL | 2221 |

### EXAMPLE 19

[0399] This Example relates to the variant HUMCACH1A_P6 (SEQ ID NO:21; the nucleic acid sequence is given by SEQ ID NO:43), which is a variant alpha 1 subunit according to the present invention, and more specifically, is a splice variant of the known protein CCAD_HUMAN, which is encoded by the CACNA1D gene. This alpha subunit is the alpha 1D subunit, which forms the voltage-dependent L-type calcium channel. It is also known as alpha subunit Cav1.3.

[0400] This alpha subunit is expressed in pancreatic islets and in brain, where it has been seen in hippocampus, basal ganglia, habenula and thalamus. The protein structure is as follows. Each of the four internal repeats contains five hydrophobic transmembrane segments (S1, S2, S3, S5, S6) and one positively charged transmembrane segment (S4). S4 segments probably represent the voltage-sensor and are characterized by a series of positively charged amino acids at every third position.

[0401] The structure of the splice variant according to the present invention features a unique insertion, as compared to the known protein sequence. An alignment is provided at the end of this section, while the comparison between the two sequences is described below.

[0402] According to preferred embodiments of the present invention, there is provided an isolated chimeric polypeptide encoding for HUMCACH1A_P6, comprising a first amino acid sequence being at least 90% homologous to (SEQ ID NO: 163) MMMMMMMKKMQHQRQQQADHANEANYARGTRLPLSGEGPTSQPNSSKQTVLSWQAAIDAARQAKAAQTMSTSAPPPVGSLSQRKRQQYAKSKKQGNSSNSRPARALFCLSLNNPIRRACISIVEWKPFDIFILLAIFANCVALAIYIPFPEDDSNSTNHNLEKVEYAFLIIFTVETFLKIIAYGLLLHPNAYVRNGWNLLDFVIVIVGLFSVILEQLTKETEGGNHSSGKSGGFDVKALRAFRVLRPLRLVSGVPSLQVVLNSIIKAMVPLLHIALLVLFVIIIYAIIGLELFIGKMHKTCFFADSDIVAEEDPAPCAFSGNGRQCTANGTECRSGWVGPNGGITNFDNFAFAMLTVFQCITMEGWTDVLYW corresponding to amino acids 1-372 of CCAD_HUMAN, which also corresponds to amino acids 1-372 of HUMCACH1A_P6, a second amino acid sequence comprising a polypeptide being at least 70%, optionally at least about 80%, preferably at least about 85%, more preferably at least about 90% and most preferably at least about 95% homologous to the sequence encoding for (SEQ ID NO: 164) VNDAIGWEWPWVYFVSLIIL corresponding to amino acids 373-392 of HUMCACH1A_P6 and a third amino acid sequence being at least 90% homologous to (SEQ ID NO: 165) GSFFVLNLVLGVLSG corresponding to amino acids 393-407 of CCAD_HUMAN, which also corresponds to amino acids 393-407 of HUMCACH1A_P6, wherein said first amino acid sequence, second amino acid sequence and third amino acid sequence are contiguous and in a sequential order.

[0403] According to preferred embodiments of the present invention, there is provided an isolated polypeptide encoding for a unique insertion of HUMCACH1A_P6, comprising an amino acid sequence being at least 70%, optionally at least about 80%, preferably at least about 85%, more preferably at least about 90% and most preferably at least about 95% homologous to the sequence encoding for (SEQ ID NO: 166) VNDAIGWEWPWVYFVSLIIL, corresponding to HUMCACH1A_P6.

[0404] 1. Domains affected by alternative splicing include the cytoplasmic loop between domain I and domain II; the S1 transmembrane domain of domain II; the extracellular loop between S1 and S2 transmembrane domains of domain II; the S2 transmembrane domain of domain II; the extracellular loop between S2 and S3 transmembrane domains of domain II; the S3 transmembrane domain of domain II; the extracellular loop between S3 and S4 transmembrane domains of domain II; the S4 transmembrane domain of domain II; the extracellular loop between S4 and S5 transmembrane domains of domain II; the S5 transmembrane domain of domain II; the pore loop region between S5 and S6 transmembrane domains of domain II; the S6 transmembrane domain of domain II; the cytoplasmic loop between domain II and domain III; the S1 transmembrane domain of domain III; the extracellular loop between S1 and S2 transmembrane domains of domain III; the S2 transmembrane domain of domain III; the extracellular loop between S2 and S3 transmembrane domains of domain III; the S3 transmembrane domain of domain III; the extracellular loop between S3 and S4 transmembrane domains of domain III; the S4 transmembrane domain of domain III; the extracellular loop between S4 and S5 transmembrane domains of domain III; the S5 transmembrane domain of domain III; the pore loop region between S5 and S6 transmembrane domains of domain III; the S6 transmembrane domain of domain III; the cytoplasmic loop between domain III and domain IV; the S1 transmembrane domain of domain IV; the extracellular loop between S1 and S2 transmembrane domains of domain IV; the S2 transmembrane domain of domain IV; the extracellular loop between S2 and S3 transmembrane domains of domain IV; the S3 transmembrane domain of domain IV; the extracellular loop between S3 and S4 transmembrane domains of domain IV; the S4 transmembrane domain of domain IV; the extracellular loop between S4 and S5 transmembrane domains of domain IV; the S5 transmembrane domain of domain IV; the pore loop region between S5 and S6 transmembrane domains of domain IV; the S6 transmembrane domain of domain IV; the cytoplasmic C-terminus region of the protein.

[0405] One domain/two-domain channels are known in the art. It was previously demonstrated for N-type Cav2.2 channels that a channel consisting of domains I and II is not functional when expressed alone but only when coexpressed with a construct forming domains III and IV. However, coexpression of these very short one or two domain isoforms with the full length channel protein markedly reduced protein quantity and current density of the full length channel. Similarly, a three-domain channel which lacked the first domain and a part of the second domain by using an alternative promotor does not produce a measurable calcium current but instead, inhibits the functional expression of the full-length form. Therefore, this type of splicing may be a mechanism to transiently down-regulate a specific calcium channel without influencing promotor regulation.

[0406] From the above description of the function of variants lacking several domains, it is expected that the variant will function as a down regulation mechanism of a known functional channel protein. This variant may optionally be used for diagnostic applications, because the presence, absence or level of such downregulation may have diagnostic implications, for example for detecting a disease and/or for selecting a therapy for the disease.

Sequence name: CCAD_HUMAN

documentaiton:

of: HUMCACH1A_P6 (SEQ ID NO: 21)×CCAD_HUMAN (SEQ ID NO: 167) . . .

segment 1/1:

[0407] Quality: 365.00

Escore: 0

Matching length: 385 Total

length: 429

Matching Percent Similarity: 100.00 Matching Percent

Identity: 100.00

Total Percent Similarity: 89.74 Total Percent

Identity: 89.74

[0408] Gaps: 2

[0409] Alignment:

| | . . . . . | |
|---|---|---|
| 1 | MMMMMMMKKMQHQRQQQADHANEANYARGTRLPLSGEGPTSQPNSSKQTV | 50 |
| | \|\|\|\|\|\|\|\|\|\|\|\|\|\|\|\|\|\|\|\|\|\|\|\|\|\|\|\|\|\|\|\|\|\|\|\|\|\|\|\|\|\|\|\|\|\|\|\|\|\| | |
| 1 | MMMMNMMKKMQHQRQQQADHANEANYARGTRLPLSGEGPTSQPNSSKQTV | 50 |
| | . . . . . | |
| 51 | LSWQAAIDAARQAKAAQTMSTSAPPPVGSLSQRKRQQYAKSKKQGNSSNS | 100 |
| | \|\|\|\|\|\|\|\|\|\|\|\|\|\|\|\|\|\|\|\|\|\|\|\|\|\|\|\|\|\|\|\|\|\|\|\|\|\|\|\|\|\|\|\|\|\|\|\|\|\| | |
| 51 | LSWQAAIDAARQAKAAQTMSTSAPPPVGSLSQRKRQQYAKSKKQGNSSNS | 100 |
| | . . . . . | |
| 101 | RPARALFCLSLNNPIRRACISIVEWKPFDIFILLAIFANCVALAIYIPFP | 150 |
| | \|\|\|\|\|\|\|\|\|\|\|\|\|\|\|\|\|\|\|\|\|\|\|\|\|\|\|\|\|\|\|\|\|\|\|\|\|\|\|\|\|\|\|\|\|\|\|\|\|\| | |
| 101 | RPARALFCLSLNNPIRRACISIVEWKPFDIFILLAIFANCVALAIYIPFP | 150 |
| | . . . . . | |
| 151 | EDDSNSTNHNLEKVEYAFLIIFTVETFLKIIAYGLLLHPNAYVRNGWNLL | 200 |
| | \|\|\|\|\|\|\|\|\|\|\|\|\|\|\|\|\|\|\|\|\|\|\|\|\|\|\|\|\|\|\|\|\|\|\|\|\|\|\|\|\|\|\|\|\|\|\|\|\|\| | |
| 151 | EDDSNSTNHNLEKVEYAFLIIFTVETFLKIIAYGLLLHPNAYVRNGWNLL | 200 |
| | . . . . . | |
| 201 | DFVIVIVGLFSVILEQLTKETEGGNHSSGKSGGFDVKALRAFRVLRPLRL | 250 |
| | \|\|\|\|\|\|\|\|\|\|\|\|\|\|\|\|\|\|\|\|\|\|\|\|\|\|\|\|\|\|\|\|\|\|\|\|\|\|\|\|\|\|\|\|\|\|\|\|\|\| | |
| 201 | DFVIVIVGLFSVILEQLTKETEGGNHSSGKSGGFDVKALRAFRVLRPLRL | 250 |
| | . . . . . | |
| 251 | VSGVPSLQVVLNSIIKAMVPLLHIALLVLFVIIIYAIIGLELFIGKMHKT | 300 |
| | \|\|\|\|\|\|\|\|\|\|\|\|\|\|\|\|\|\|\|\|\|\|\|\|\|\|\|\|\|\|\|\|\|\|\|\|\|\|\|\|\|\|\|\|\|\|\|\|\|\| | |
| 251 | VSGVPSLQVVLNSIIKAMVPLLHIALLVLFVIIIYAIIGLELFIGKMHKT | 300 |
| | . . . . . | |
| 301 | CFFADSDIVAEEDPAPCAFSGNGRQCTANGTECRSGWVGPNGGITNFDNF | 350 |
| | \|\|\|\|\|\|\|\|\|\|\|\|\|\|\|\|\|\|\|\|\|\|\|\|\|\|\|\|\|\|\|\|\|\|\|\|\|\|\|\|\|\|\|\|\|\|\|\|\|\| | |
| 301 | CFFADSDIVAEEDPAPCAFSGNGRQCTANGTECRSGWVGPNGGITNFDNF | 350 |
| | . . . . . | |
| 351 | AFAMLTVFQCITMEGWTDVLYWVNDAIGWEWPWVYFVSLIIL...... | 392 |
| | \|\|\|\|\|\|\|\|\|\|\|\|\|\|\|\|\|\|\|\|\|\| | |
| 351 | AFAMLTVFQCITMEGWTDVLYW....................MNDAMG | 378 |
| | . . | |
| 393 | ..............GSFFVLNLVLGVLSG | 407 |
| | \|\|\|\|\|\|\|\|\|\|\|\|\|\|\| | |
| 379 | FELPWVYFVSLVIFGSFFVLNLVLGVLSG | 407 |

### EXAMPLE 20

[0410] This Example relates to the variant HUMLVDCCB_P16 (SEQ ID NO:9; the nucleic acid sequence is given by SEQ ID NO:31), which is a variant alpha 1 subunit according to the present invention, and more specifically, is a splice variant of the known protein CCAC_HUMAN, which is encoded by the CACNA1C gene. This alpha subunit is the alpha 1C subunit, which forms the voltage-dependent L-type calcium channel. This subunit is also called the alpha subunit Cav1.2. The known protein is described in greater detail above with regard to Example 14.

[0411] The structure of the splice variant according to the present invention features unique insertions, skipped exon and unique tail, as compared to the known protein sequence. An alignment is provided at the end of this section, while the comparison between the two sequences is described below.

[0412] According to preferred embodiments of the present invention, there is provided an isolated chimeric polypeptide encoding for HUMLVDCCB_P16, comprising a first amino acid sequence being at least 90% homologous to (SEQ ID NO: 168) MVNENTRMYIPEENHQGSNYGSPRPAHANMNANAAAGLAPEHIPTPGAALSWQAAIDAARQAKLMGSAGNATISTVSSTQRKRQQYGKPKKQGSTTATRPPRALLCLTLKNPIRRACISIVEWKPFEIIILLTIFANCVALAIYIPFPEDDSNATNSNLERVEYLFLIIFTVEAFLKVIAYGLLFHPNAYLRNGWNLLDFIIVVVGLFSAILEQATKADGANALGGKGAGFDVKALRAFRVLRPLRLVSGVPSLQVVLNSIIKAMVPLLHIALLVLFVIIIYAIIGLELFMGKMHKTCYNQEGIADVPAEDDPSPCALETGHGRQCQNGTVCKPGWDGPKHGITNFDNFAFAMLTVFQCITMEGWTDVLYWVNDAVGRDWPWIYFVTLIIIGSFFVLNLVLGVLSGEFSKEREKAKARGDFQKLREKQQLEEDLKGYLDWITQAEDIDPENEDEGMDEEKPRN corresponding to amino acids 1-463 of CCAC_HUMAN, which also corresponds to amino acids 1-463 of HUMLVDCCB_P16, a second amino acid sequence being at least 70%, optionally at least 80%, preferably at least 85%, more preferably at least 90% and most preferably at least 95% homologous to a polypeptide having the sequence (SEQ ID NO: 169) RGTPAGMLDQKKGKFAWFSHSTETHV corresponding to amino acids 464-489 of HUMLVDCCB_P16, a third amino acid sequence being at least 90% homologous to (SEQ ID NO: 170) SMPTSETESVNTENVAGGDIEGENCGARLAHRISKSKFSRYWRRWNRFCRRKCRAAVKSNVFYWLVIFLVFLNTLTIASEHYNQPNWLTEVQDTANKALLALFTAEMLLKMYSLGLQAYFVSLFNRFDCFVVCGGILETILVETKIMSPLGISVLRCVRLLRIFKITRYWNSLSNLVASLLNSVRSIASLLLLLFLFIIIFSLLGMQLFGGKFNFDEMQTRRSTFDNFPQSLLTVFQILTGEDWNSVMYDGIMAYGGPSFPGMLVCIYFIILFICGNYILLNVFLAIAVDNLADAESLTSAQKEEEEEKERKKLARTASPEKKQELVEKPAVGESKEEKIELKSITADGESPPATKINMDDLQPNENEDKSPYPNPETTGEEDEEEPEMPVGPRPRPLSELHLKEKAVPMPEASAFFIFSSNNRFRLQCHRIVNDTIFTNLILFFILLSSISLAAEDPVQHTSFRNHILFYFDIVFTTIFTIEIA corresponding to amino acids 465-949 of CCAC_HUMAN, which also corresponds to amino acids 490-974 of HUMLVDCCB_P16, a fourth amino acid sequence being at least 90% homologous to (SEQ ID NO: 171) LKMTAYGAFLHKGSFCRNYFNILDLLVVSVSLISFGIQSSAINVVKILRVLRVLRPLRAINRAKGLKHVVQCVFVAIRTIGNIVIVTTLLQFMFACIGVQLFKGKLYTCSDSSKQTEAECKGNYITYKDGEVDHPIIQPRSWENSKFDFDNVLAAMMALFTVSTFEGWPELLYRSIDSHTEDKGPIYNYRVEISIFFIIYIIIIAFFMMNIFVGFVIVTFQEQGEQEYKNCELDKNQRQCVEYALKARPLRRYIPKNQHQYKVWYVVNSTYFEYLMFVLILLNTICLAMQHYGQSCLFKIAMNILNMLFTGLFTVEMILKLIAFKPK corresponding to amino acids 970-1296 of CCAC_HUMAN, which also corresponds to amino acids 975-1301 of HUMLVDCCB_P16, a fifth amino acid sequence being at least 90% homologous to (SEQ ID NO: 172) HYFCDAWNTFDALIVVGSIVDIAITEVNPAEHTQCSPSMNAEENSRISITFFRLFRVMRLVKLLSRGEGIRTLLWTFIKSFQALPYVALLIVMLFFIYAVIGMQVFGKIALNDTTEINRNNNFQTFPQAVLLLFRCATGEAWQDIMLACMPGKKCAPESEPSNSTEGETPCGSSFAVFYFISFYMLCAFLIINLFVAVIMDNFDYLTRDWSILGPHHLDEFKRIWAEYDPEAKGRIKHLDVVTLLRRIQPPLGFGKLCPHRVACKRLVSMNMPLNSDGTVMFNATLFALVRTALRIKTE corresponding to amino acids 1325-1623 of CCAC_HUMAN, which also corresponds to amino acids 1302-1600 of HUMLVDCCB_P16, a sixth amino acid sequence being at least 70%, optionally at least 80%, preferably at least 85%, more preferably at least 90% and most preferably at least 95% homologous to a polypeptide having the sequence (SEQ ID NO: 173) EGPSPSEAHQGAEDPFRPA corresponding to amino acids 1601-1619 of HUMLVDCCB_P16, a seventh amino acid sequence being at least 90% homologous to (SEQ ID NO: 174) GNLEQANEELRAIIKKIWKRTSMKLLDQVVPPAGDDEVTVGKFYATFLIQEYFRKFKKRKEQGLVGKPSQRNALSLQAGLRTLHDIGPEIRRAISGDLTAEEELDKAMKEAVSAASEDDIFRRAGGLFGNHVSYYQSDGRSAFPQTFTTQRPLHINKAGSSQGDTESPSHEKLVDSTFTPSSYSSTGSNANINNANNTALGRLPRPAGYPSTVSTVEGHGPPLSPAIRVQEVAWKLSSN corresponding to amino acids 1624-1862 of CCAC_HUMAN, which also corresponds to amino acids 1620-1858 of HUMLVDCCB_P16, a eight amino acid sequence being at least 90% homologous to (SEQ ID NO: 175) RCHSRESQAAMAGQEETSQDETYEVKMNHDTEACSEPSLLSTEMLSYQDDENRQLTLPEEDKRDIRQSPKRGFLRSASLGRRASFHLECLKRQKDRGGDISQKTVLPLHLVHHQALAVAGLSPLLQRSHSPASFPRPFATPPATPGSRGWPPQPVPTLRLEGVESSEKLNSSFPSIHCGSWAETTPGGGGSSAARRVRPVSLMVPSQAGAPGRQFHGSASSLVEAV corresponding to amino acids 1898-2123 of CCAC_HUMAN, which also corresponds to amino acids 1859-2084 of HUMLVDCCB_P16, a ninth amino acid sequence being at least 70%, optionally at least 80%, preferably at least 85%, more preferably at least 90% and most preferably at least 95% homologous to a polypeptide having the sequence (SEQ ID NO: 176) GDSQMGRGERPRATRGLGMRG corresponding to amino acids 2085-2105 of HUMLVDCCB_P16, wherein said first amino acid sequence, second amino acid sequence, third amino acid sequence, fourth amino acid sequence, fifth amino acid sequence, sixth amino acid sequence, seventh amino acid sequence, eight amino acid sequence and ninth amino acid sequence are contiguous and in a sequential order.

[0413] According to preferred embodiments of the present invention, there is provided an isolated polypeptide encoding for an edge portion of HUMLVDCCB_P16, comprising an amino acid sequence being at least 70%, optionally at least about 80%, preferably at least about 85%, more preferably at least about 90% and most preferably at least about 95% homologous to the sequence encoding for (SEQ ID NO: 177) RGTPAGMLDQKKGKFAWFSHSTETHV, corresponding to HUMLVDCCB_P16.

[0414] According to preferred embodiments of the present invention, there is provided a bridge portion of HUMLVDCCB_P16, comprising a polypeptide having a length “n”, wherein n is at least about 10 amino acids in length, optionally at least about 20 amino acids in length, preferably at least about 30 amino acids in length, more preferably at least about 40 amino acids in length and most preferably at least about 50 amino acids in length, wherein at least two amino acids comprise N, having a structure as follows (numbering according to HUMLVDCCB_P16): a sequence starting from any of amino acid numbers 463−x to 463; and ending at any of amino acid numbers 464+((n−2)−x), in which x varies from 0 to n−2.

[0415] According to preferred embodiments of the present invention, there is provided an isolated chimeric polypeptide encoding for an edge portion of HUMLVDCCB_P16, comprising a polypeptide having a length “n”, wherein n is at least about 10 amino acids in length, optionally at least about 20 amino acids in length, preferably at least about 30 amino acids in length, more preferably at least about 40 amino acids in length and most preferably at least about 50 amino acids in length, wherein at least two amino acids comprise AL, having a structure as follows: a sequence starting from any of amino acid numbers 974−x to 974; and ending at any of amino acid numbers 975+((n−2)−x), in which x varies from 0 to n−2.

[0416] According to preferred embodiments of the present invention, there is provided an isolated chimeric polypeptide encoding for an edge portion of HUMLVDCCB_P16, comprising a polypeptide having a length “n”, wherein n is at least about 10 amino acids in length, optionally at least about 20 amino acids in length, preferably at least about 30 amino acids in length, more preferably at least about 40 amino acids in length and most preferably at least about 50 amino acids in length, wherein at least two amino acids comprise KH, having a structure as follows: a sequence starting from any of amino acid numbers 1301−x to 1301; and ending at any of amino acid numbers 1302+((n−2)−x), in which x varies from 0 to n−2.

[0417] According to preferred embodiments of the present invention, there is provided an isolated polypeptide encoding for an edge portion of HUMLVDCCB_P116, comprising an amino acid sequence being at least 70%, optionally at least about 80%, preferably at least about 85%, more preferably at least about 90% and most preferably at least about 95% homologous to the sequence encoding for (SEQ ID NO: 178) EGPSPSEAHQGAEDPFRPA, corresponding to HUMLVDCCB_P16.

[0418] According to preferred embodiments of the present invention, there is provided an isolated chimeric polypeptide encoding for an edge portion of HUMLVDCCB_P16, comprising a polypeptide having a length “n”, wherein n is at least about 10 amino acids in length, optionally at least about 20 amino acids in length, preferably at least about 30 amino acids in length, more preferably at least about 40 amino acids in length and most preferably at least about 50 amino acids in length, wherein at least two amino acids comprise NR, having a structure as follows: a sequence starting from any of amino acid numbers 1858−x to 1858; and ending at any of amino acid numbers 1859+((n−2)−x), in which x varies from 0 to n−2.

[0419] According to preferred embodiments of the present invention, there is provided an isolated polypeptide encoding for a tail of HUMLVDCCB_P16, comprising a polypeptide being at least 70%, optionally at least about 80%, preferably at least about 85%, more preferably at least about 90% and most preferably at least about 95% homologous to the sequence (SEQ ID NO: 179) GDSQMGRGERPRATRGLGMRG in HUMLVDCCB_P16.

[0420] 1. Domains affected by alternative splicing include: the cytoplasmic loop between domain I and domain II; the S2 transmembrane domain of domain III; the extracellular loop between S2 and S3 transmembrane domains of domain III; the extracellular loop between S2 and S3 transmembrane domains of domain IV; the S3 transmembrane domain of domain IV; the extracellular loop between S3 and S4 transmembrane domains of domain IV the cytoplasmic C-terminus region of the protein.

[0421] Potential effects of changes in this variant are described in Example 14.

[0422] From the above description of the effect of changes to the C-terminus domain of this variant, it is expected that the variant will have greater current amplitude as compared to the known protein and a stronger calcium dependence of inactivation. It is also expected to modulate the Ca⁺²-dependent inactivation of the channel.

[0423] In addition, the changes in the S2 transmembrane domain of domain III might influence the voltage-dependent action of dihydropyridines.

Sequence name: CCAC_HUMAN

documentation:

of: HUMLVDCCB_P16 (residues 1-2084 of SEQ ID NO: 9)×CCAC_(SEQ ID NO: 180) . . .

segment 1/1:

[0424] Quality: 19433.00

Escore: 0

Matching length: 2040 Total

length: 2167

Matching Percent Similarity: 100.00 Matching Percent

Identity: 99.95

Total Percent Similarity: 94.14 Total Percent

Identity: 94.09

[0425] Gaps: 5

| | . . . . . | |
|---|---|---|
| 1 | MVNENTRMYIPEENHQGSNYGSPRPAHANMNANAAAGLAPEHIPTPGAAL | 50 |
| | \|\|\|\|\|\|\|\|\|\|\|\|\|\|\|\|\|\|\|\|\|\|\|\|\|\|\|\|\|\|\|\|\|\|\|\|\|\|\|\|\|\|\|\|\|\|\|\|\|\| | |
| 1 | MVNENTRMYIPEENHQGSNYGSPRPAHANMNANAAAGLAPEHIPTPGAAL | 50 |
| | . . . . . | |
| 51 | SWQAAIDAARQAKLMGSAGNATISTVSSTQRKRQQYGKPKKQGSTTATRP | 100 |
| | \|\|\|\|\|\|\|\|\|\|\|\|\|\|\|\|\|\|\|\|\|\|\|\|\|\|\|\|\|\|\|\|\|\|\|\|\|\|\|\|\|\|\|\|\|\|\|\|\|\| | |
| 51 | SWQAAIDAARQAKLMGSAGNATISTVSSTQRKRQQYGKPKKQGSTTATRP | 100 |
| | . . . . . | |
| 101 | PRALLCLTLKNPIRRACISIVEWKPFEIIILLTIFANCVALAIYIPFPED | 150 |
| | \|\|\|\|\|\|\|\|\|\|\|\|\|\|\|\|\|\|\|\|\|\|\|\|\|\|\|\|\|\|\|\|\|\|\|\|\|\|\|\|\|\|\|\|\|\|\|\|\|\| | |
| 101 | PRALLCLTLKNPIRRACISIVEWKPFEIIILLTIFANCVALAIYIPFPED | 150 |
| | . . . . . | |
| 151 | DSNATNSNLERVEYLFLIIFTVEAFLKVIAYGLLFHPNAYLRNGWNLLDF | 200 |
| | \|\|\|\|\|\|\|\|\|\|\|\|\|\|\|\|\|\|\|\|\|\|\|\|\|\|\|\|\|\|\|\|\|\|\|\|\|\|\|\|\|\|\|\|\|\|\|\|\|\| | |
| 151 | DSNATNSNLERVEYLFLIIFTVEAFLKVIAYGLLFHPNAYLRNGWNLLDF | 200 |
| | . . . . . | |
| 201 | IIVVVGLFSAILEQATKADGANALGGKGAGFDVKALRAFRVLRPLRLVSG | 250 |
| | \|\|\|\|\|\|\|\|\|\|\|\|\|\|\|\|\|\|\|\|\|\|\|\|\|\|\|\|\|\|\|\|\|\|\|\|\|\|\|\|\|\|\|\|\|\|\|\|\|\| | |
| 201 | IIVVVGLFSAILEQATKADGANALGGKGAGFDVKALRAFRVLRPLRLVSG | 250 |
| | . . . . . | |
| 251 | VPSLQVVLNSIIKAMVPLLHIALLVLFVIIIYAIIGLELFMGKMHKTCYN | 300 |
| | \|\|\|\|\|\|\|\|\|\|\|\|\|\|\|\|\|\|\|\|\|\|\|\|\|\|\|\|\|\|\|\|\|\|\|\|\|\|\|\|\|\|\|\|\|\|\|\|\|\| | |
| 251 | VPSLQVVLNSIIKAMVPLLHIALLVLFVIIIYAIIGLELFMGKMHKTCYN | 300 |
| | . . . . . | |
| 301 | QEGIADVPAEDDPSPCALETGHGRQCQNGTVCKPGWDGPKHGITNFDNFA | 350 |
| | \|\|\|\|\|\|\|\|\|\|\|\|\|\|\|\|\|\|\|\|\|\|\|\|\|\|\|\|\|\|\|\|\|\|\|\|\|\|\|\|\|\|\|\|\|\|\|\|\|\| | |
| 301 | QEGIADVPAEDDPSPCALETGHGRQCQNGTVCKPGWDGPKHGITNFDNFA | 350 |
| | . . . . . | |
| 351 | FAMLTVFQCITMEGWTDVLYWVNDAVGRDWPWIYFVTLIIIGSFFVLNLV | 400 |
| | \|\|\|\|\|\|\|\|\|\|\|\|\|\|\|\|\|\|\|\|\|\|\|\|\|\|\|\|\|\|\|\|\|\|\|\|\|\|\|\|\|\|\|\|\|\|\|\|\|\| | |
| 351 | FAMLTVFQCITMEGWTDVLYWVNDAVGRDWPWIYFVTLIIIGSFFVLNLV | 400 |
| | . . . . . | |
| 401 | LGVLSGEFSKEREKAKARGDFQKLREKQQLEEDLKGYLDWITQAEDIDPE | 450 |
| | \|\|\|\|\|\|\|\|\|\|\|\|\|\|\|\|\|\|\|\|\|\|\|\|\|\|\|\|\|\|\|\|\|\|\|\|\|\|\|\|\|\|\|\|\|\|\|\|\|\| | |
| 401 | LGVLSGEFSKEREKAKARGDFQKLREKQQLEEDLKGYLDWITQAEDIDPE | 450 |
| | . . . . . | |
| 451 | NEDEGMDEEKPRNRGTPAGMLDQKKGKFAWFSHSTETHVSMPTSETESVN | 500 |
| | \|\|\|\|\|\|\|\|\|\|\|\|\| :\|\|\|\|\|\|\|\|\|\|\| | |
| 451 | NEDEGMDEEKPRN.........................MSMPTSETESVN | 475 |
| | . . . . . | |
| 501 | TENVAGGDIEGENCGARLAHRISKSKFSRYWRRWNRFCRRKCRAAVKSNV | 550 |
| | \|\|\|\|\|\|\|\|\|\|\|\|\|\|\|\|\|\|\|\|\|\|\|\|\|\|\|\|\|\|\|\|\|\|\|\|\|\|\|\|\|\|\|\|\|\|\|\|\|\| | |
| 476 | TENVAGGDIEGENCGARLAHRISKSKFSRYWRRWNRFCRRKCRAAVKSNV | 525 |
| | . . . . . | |
| 551 | FYWLVIFLVFLNTLTIASEHYNQPNWLTEVQDTANKALLALFTAEMLLKM | 600 |
| | \|\|\|\|\|\|\|\|\|\|\|\|\|\|\|\|\|\|\|\|\|\|\|\|\|\|\|\|\|\|\|\|\|\|\|\|\|\|\|\|\|\|\|\|\|\|\|\|\|\| | |
| 526 | FYWLVIFLVFLNTLTIASEHYNQPNWLTEVQDTANKALLALFTAEMLLKM | 575 |
| | . . . . . | |
| 601 | YSLGLQAYFVSLFNRFDCFVVCGGILETILVETKIMSPLGISVLRCVRLL | 650 |
| | \|\|\|\|\|\|\|\|\|\|\|\|\|\|\|\|\|\|\|\|\|\|\|\|\|\|\|\|\|\|\|\|\|\|\|\|\|\|\|\|\|\|\|\|\|\|\|\|\|\| | |
| 576 | YSLGLQAYFVSLFNRFDCFVVCGGILETILVETKIMSPLGISVLRCVRLL | 625 |
| | . . . . . | |
| 651 | RIFKITRYWNSLSNLVASLLNSVRSIASLLLLLFLFIIIFSLLGMQLFGG | 700 |
| | \|\|\|\|\|\|\|\|\|\|\|\|\|\|\|\|\|\|\|\|\|\|\|\|\|\|\|\|\|\|\|\|\|\|\|\|\|\|\|\|\|\|\|\|\|\|\|\|\|\| | |
| 626 | RIFKITRYWNSLSNLVASLLNSVRSIASLLLLLFLFIIIFSLLGMQLFGG | 675 |
| | . . . . . | |
| 701 | KFNFDEMQTRRSTFDNFPQSLLTVFQILTGEDWNSVMYDGIMAYGGPSFP | 750 |
| | \|\|\|\|\|\|\|\|\|\|\|\|\|\|\|\|\|\|\|\|\|\|\|\|\|\|\|\|\|\|\|\|\|\|\|\|\|\|\|\|\|\|\|\|\|\|\|\|\|\| | |
| 676 | KFNFDEMQTRRSTFDNFPQSLLTVFQILTGEDWNSVMYDGIMAYGGPSFP | 725 |
| | . . . . . | |
| 751 | GMLVCIYFIILFICGNYILLNVFLAIAVDNLADAESLTSAQKEEEEEKER | 800 |
| | \|\|\|\|\|\|\|\|\|\|\|\|\|\|\|\|\|\|\|\|\|\|\|\|\|\|\|\|\|\|\|\|\|\|\|\|\|\|\|\|\|\|\|\|\|\|\|\|\|\| | |
| 726 | GMLVCIYFIILFICGNYILLNVFLAIAVDNLADAESLTSAQKEEEEEKER | 775 |
| | . . . . . | |
| 801 | KKLARTASPEKKQELVEKPAVGESKEEKIELKSITADGESPPATKINMDD | 850 |
| | \|\|\|\|\|\|\|\|\|\|\|\|\|\|\|\|\|\|\|\|\|\|\|\|\|\|\|\|\|\|\|\|\|\|\|\|\|\|\|\|\|\|\|\|\|\|\|\|\|\| | |
| 776 | KKLARTASPEKKQELVEKPAVGESKEEKIELKSITADGESPPATKINMDD | 825 |
| | . . . . . | |
| 851 | LQPNENEDKSPYPNPETTGEEDEEEPEMPVGPRPRPLSELHLKEKAVPMP | 900 |
| | \|\|\|\|\|\|\|\|\|\|\|\|\|\|\|\|\|\|\|\|\|\|\|\|\|\|\|\|\|\|\|\|\|\|\|\|\|\|\|\|\|\|\|\|\|\|\|\|\|\| | |
| 826 | LQPNENEDKSPYPNPETTGEEDEEEPEMPVGPRPRPLSELHLKEKAVPMP | 875 |
| | . . . . . | |
| 901 | EASAFFIFSSNNRFRLQCHRIVNDTIFTNLILFFILLSSISLAAEDPVQH | 950 |
| | \|\|\|\|\|\|\|\|\|\|\|\|\|\|\|\|\|\|\|\|\|\|\|\|\|\|\|\|\|\|\|\|\|\|\|\|\|\|\|\|\|\|\|\|\|\|\|\|\|\| | |
| 876 | EASAFFIFSSNNRFRLQCHRIVNDTIFTNLILFFILLSSISLAAEDPVQH | 925 |
| | . . . . . | |
| 951 | TSFRNHILFYFDIVFTTIFTIEIA....................LKMTAY | 980 |
| | \|\|\|\|\|\|\|\|\|\|\|\|\|\|\|\|\|\|\|\|\|\|\|\| \|\|\|\|\|\| | |
| 926 | TSFRNHILFYFDIVFTTIFTIEIALKILGNADYVETSIFTLEIILKMTAY | 975 |
| | . . . . . | |
| 981 | GAFLHKGSFCRNYFNILDLLVVSVSLISFGIQSSAINVVKILRVLRVLRP | 1030 |
| | \|\|\|\|\|\|\|\|\|\|\|\|\|\|\|\|\|\|\|\|\|\|\|\|\|\|\|\|\|\|\|\|\|\|\|\|\|\|\|\|\|\|\|\|\|\|\|\|\|\| | |
| 976 | GAFLHKGSFCRNYFNILDLLVVSVSLISFGIQSSAINVVKILRVLRVLRP | 1025 |
| | . . . . . | |
| 1031 | LRAINRAKGLKHVVQCVFVAIRTIGNIVIVTTLLQFMFACIGVQLFKGKL | 1080 |
| | \|\|\|\|\|\|\|\|\|\|\|\|\|\|\|\|\|\|\|\|\|\|\|\|\|\|\|\|\|\|\|\|\|\|\|\|\|\|\|\|\|\|\|\|\|\|\|\|\|\| | |
| 1026 | LRAINRAKGLKHVVQCVFVAIRTIGNIVIVTTLLQFMFACIGVQLFKGKL | 1075 |
| | . . . . . | |
| 1081 | YTCSDSSKQTEAKCKGNYITYKDGEVDHPIIQPRSWENSKFDFDNVLAAM | 1130 |
| | \|\|\|\|\|\|\|\|\|\|\|\|\|\|\|\|\|\|\|\|\|\|\|\|\|\|\|\|\|\|\|\|\|\|\|\|\|\|\|\|\|\|\|\|\|\|\|\|\|\| | |
| 1076 | YTCSDSSKQTEAKCKGNYITYKDGEVDHPIIQPRSWENSKFDFDNVLAAM | 1125 |
| | . . . . . | |
| 1131 | MALFTVSTFEGWPELLYRSIDSHTEDKGPIYNYRVEISIFFIIYIIIIAF | 1180 |
| | \|\|\|\|\|\|\|\|\|\|\|\|\|\|\|\|\|\|\|\|\|\|\|\|\|\|\|\|\|\|\|\|\|\|\|\|\|\|\|\|\|\|\|\|\|\|\|\|\|\| | |
| 1126 | MALFTVSTFEGWPELLYRSIDSHTEDKGPIYNYRVEISIFFIIYIIIIAF | 1175 |
| | . . . . . | |
| 1181 | FMMNIFVGFVIVTFQEQGEQEYKNCELDKNQRQCVEYALKARPLRRYIPK | 1230 |
| | \|\|\|\|\|\|\|\|\|\|\|\|\|\|\|\|\|\|\|\|\|\|\|\|\|\|\|\|\|\|\|\|\|\|\|\|\|\|\|\|\|\|\|\|\|\|\|\|\|\| | |
| 1176 | FMMNIFVGFVIVTFQEQGEQEYKNCELDKNQRQCVEYALKARPLRRYIPK | 1225 |
| | . . . . . | |
| 1231 | NQHQYKVWYVVNSTYFEYLMFVLILLNTICLAMQHYGQSCLFKIAMNILN | 1280 |
| | \|\|\|\|\|\|\|\|\|\|\|\|\|\|\|\|\|\|\|\|\|\|\|\|\|\|\|\|\|\|\|\|\|\|\|\|\|\|\|\|\|\|\|\|\|\|\|\|\|\| | |
| 1226 | NQHQYKVWYVVNSTYFEYLMFVLILLNTICLAMQHYGQSCLFKIAMNILN | 1275 |
| | . . . . . | |
| 1281 | MLFTGLFTVEMILKLIAFKPK............................H | 1302 |
| | \|\|\|\|\|\|\|\|\|\|\|\|\|\|\|\|\|\|\|\|\| \| | |
| 1276 | MLFTGLFTVEMILKLIAFKPKGYFSDPWNVFDFLIVIGSIIDVILSETNH | 1325 |
| | . . . . . | |
| 1303 | YFCDAWNTFDALIVVGSIVDIAITEVNPAEHTQCSPSMNAEENSRISITF | 1352 |
| | \|\|\|\|\|\|\|\|\|\|\|\|\|\|\|\|\|\|\|\|\|\|\|\|\|\|\|\|\|\|\|\|\|\|\|\|\|\|\|\|\|\|\|\|\|\|\|\|\|\| | |
| 1326 | YFCDAWNTFDALIVVGSIVDIAITEVNPAEHTQCSPSMNAEENSRISITF | 1375 |
| | . . . . . | |
| 1353 | FRLFRVMRLVKLLSRGEGIRTLLWTFIKSFQALPYVALLIVMLFFIYAVI | 1402 |
| | \|\|\|\|\|\|\|\|\|\|\|\|\|\|\|\|\|\|\|\|\|\|\|\|\|\|\|\|\|\|\|\|\|\|\|\|\|\|\|\|\|\|\|\|\|\|\|\|\|\| | |
| 1376 | FRLFRVMRLVKLLSRGEGIRTLLWTFIKSFQALPYVALLIVMLFFIYAVI | 1425 |
| | . . . . . | |
| 1403 | GMQVFGKIALNDTTEINRNNNFQTFPQAVLLLFRCATGEAWQDIMLACMP | 1452 |
| | \|\|\|\|\|\|\|\|\|\|\|\|\|\|\|\|\|\|\|\|\|\|\|\|\|\|\|\|\|\|\|\|\|\|\|\|\|\|\|\|\|\|\|\|\|\|\|\|\|\| | |
| 1426 | GMQVFGKIALNDTTEINRNNNFQTFPQAVLLLFRCATGEAWQDIMLACMP | 1475 |
| | . . . . . | |
| 1453 | GKKCAPESEPSNSTEGETPCGSSFAVFYFISFYMLCAFLIINLFVAVIMD | 1502 |
| | \|\|\|\|\|\|\|\|\|\|\|\|\|\|\|\|\|\|\|\|\|\|\|\|\|\|\|\|\|\|\|\|\|\|\|\|\|\|\|\|\|\|\|\|\|\|\|\|\|\| | |
| 1476 | GKKCAPESEPSNSTEGETPCGSSFAVFYFISFYMLCAFLITNLFVAVIMD | 1525 |
| | . . . . . | |
| 1503 | NFDYLTRDWSILGPHHLDEFKRIWAEYDPEAKGRIKHLDVVTLLRRIQPP | 1552 |
| | \|\|\|\|\|\|\|\|\|\|\|\|\|\|\|\|\|\|\|\|\|\|\|\|\|\|\|\|\|\|\|\|\|\|\|\|\|\|\|\|\|\|\|\|\|\|\|\|\|\| | |
| 1526 | NFDYLTRDWSILGPHHLDEFKRIWAEYDPEAKGRIKHLDVVTLLRRIQPP | 1575 |
| | . . . . . | |
| 1553 | LGFGKLCPHRVACKRLVSMNMPLNSDGTVMFNATLFALVRTALRIKTEEG | 1602 |
| | \|\|\|\|\|\|\|\|\|\|\|\|\|\|\|\|\|\|\|\|\|\|\|\|\|\|\|\|\|\|\|\|\|\|\|\|\|\|\|\|\|\|\|\|\|\|\|\| | |
| 1576 | LGFGKLCPHRVACKRLVSMNMPLNSDGTVMFNATLFALVRTALRIKTE.. | 1623 |
| | . . . . . | |
| 1603 | PSPSEAHQGAEDPFRPAGNLEQANEELRAIIKKIWKRTSMKLLDQVVPPA | 1652 |
| | \|\|\|\|\|\|\|\|\|\|\|\|\|\|\|\|\|\|\|\|\|\|\|\|\|\|\|\|\|\|\|\|\| | |
| 1624 | .................GNLEQANEELRAIIKKIWKRTSMKLLDQVVPPA | 1656 |
| | . . . . . | |
| 1653 | GDDEVTVGKFYATFLIQEYFRKFKKRKEQGLVGKPSQRNALSLQAGLRTL | 1702 |
| | \|\|\|\|\|\|\|\|\|\|\|\|\|\|\|\|\|\|\|\|\|\|\|\|\|\|\|\|\|\|\|\|\|\|\|\|\|\|\|\|\|\|\|\|\|\|\|\|\|\| | |
| 1657 | GDDEVTVGKFYATFLIQEYFRKFKKRKEQGLVGKPSQRNALSLQAGLRTL | 1706 |
| | . . . . . | |
| 1703 | HDIGPEIRRAISGDLTAEEELDKAMKEAVSAASEDDIFRRAGGLFGNHVS | 1752 |
| | \|\|\|\|\|\|\|\|\|\|\|\|\|\|\|\|\|\|\|\|\|\|\|\|\|\|\|\|\|\|\|\|\|\|\|\|\|\|\|\|\|\|\|\|\|\|\|\|\|\| | |
| 1707 | HDIGPEIRRAISGDLTAEEELDKAMKEAVSAASEDDIFRRAGGLFGNHVS | 1756 |
| | . . . . . | |
| 1753 | YYQSDGRSAFPQTFTTQRPLHINKAGSSQGDTESPSHEKLVDSTFTPSSY | 1802 |
| | \|\|\|\|\|\|\|\|\|\|\|\|\|\|\|\|\|\|\|\|\|\|\|\|\|\|\|\|\|\|\|\|\|\|\|\|\|\|\|\|\|\|\|\|\|\|\|\|\|\| | |
| 1757 | YYQSDGRSAFPQTFTTQRPLHINKAGSSQGDTESPSHEKLVDSTFTPSSY | 1806 |
| | . . . . . | |
| 1803 | SSTGSNANINNANNTALGRLPRPAGYPSTVSTVEGHGPPLSPAIRVQEVA | 1852 |
| | \|\|\|\|\|\|\|\|\|\|\|\|\|\|\|\|\|\|\|\|\|\|\|\|\|\|\|\|\|\|\|\|\|\|\|\|\|\|\|\|\|\|\|\|\|\|\|\|\|\| | |
| 1807 | SSTGSNANINNANNTALGRLPRPAGYPSTVSTVEGHGPPLSPAIRVQEVA | 1856 |
| | . . . . . | |
| 1853 | WKLSSN...................................RCHSRESQA | 1867 |
| | \|\|\|\|\|\| \|\|\|\|\|\|\|\|\| | |
| 1857 | WKLSSNRERHVPVCEDLELRRDSGSAGTQAHCLLLRRANPSRCHSRESQA | 1906 |
| | . . . . . | |
| 1868 | AMAGQEETSQDETYEVKMNHDTEACSEPSLLSTEMLSYQDDENRQLTLPE | 1917 |
| | \|\|\|\|\|\|\|\|\|\|\|\|\|\|\|\|\|\|\|\|\|\|\|\|\|\|\|\|\|\|\|\|\|\|\|\|\|\|\|\|\|\|\|\|\|\|\|\|\|\| | |
| 1907 | AMAGQEETSQDETYEVKMNHDTEACSEPSLLSTEMLSYQDDENRQLTLPE | 1956 |
| | . . . . . | |
| 1918 | EDKRDIRQSPKRGFLRSASLGRRASFHLECLKRQKDRGGDISQKTVLPLH | 1967 |
| | \|\|\|\|\|\|\|\|\|\|\|\|\|\|\|\|\|\|\|\|\|\|\|\|\|\|\|\|\|\|\|\|\|\|\|\|\|\|\|\|\|\|\|\|\|\|\|\|\|\| | |
| 1957 | EDKRDIRQSPKRGFLRSASLGRRASFHLECLKRQKDRGGDISQKTVLPLH | 2006 |
| | . . . . . | |
| 1968 | LVHHQALAVAGLSPLLQRSHSPASFPRPFATPPATPGSRGWPPQPVPTLR | 2017 |
| | \|\|\|\|\|\|\|\|\|\|\|\|\|\|\|\|\|\|\|\|\|\|\|\|\|\|\|\|\|\|\|\|\|\|\|\|\|\|\|\|\|\|\|\|\|\|\|\|\|\| | |
| 2007 | LVHHQALAVAGLSPLLQRSHSPASFPRPFATPPATPGSRGWPPQPVPTLR | 2056 |
| | . . . . . | |
| 2018 | LEGVESSEKLNSSFPSIHCGSWAETTPGGGGSSAARRVRPVSLMVPSQAG | 2067 |
| | \|\|\|\|\|\|\|\|\|\|\|\|\|\|\|\|\|\|\|\|\|\|\|\|\|\|\|\|\|\|\|\|\|\|\|\|\|\|\|\|\|\|\|\|\|\|\|\|\|\| | |
| 2057 | LEGVESSEKLNSSFPSIHCGSWAETTPGGGGSSAARRVRPVSLMVPSQAG | 2106 |
| | . | |
| 2068 | APGRQEHGSASSLVEAV | 2084 |
| | \|\|\|\|\|\|\|\|\|\|\|\|\|\|\|\|\| | |
| 2107 | APGRQFHGSASSLVEAV | 2123 |

### EXAMPLE 21

[0426] This Example relates to the variant HUMCACH1A_P4 (SEQ ID NO:20; the nucleic acid sequence is given by SEQ ID NO:42), which is a variant alpha 1 subunit according to the present invention, and more specifically, is a splice variant of the known protein CCAD_HUMAN, which is encoded by the CACNA1D gene. This alpha subunit is the alpha 1D subunit, which forms the voltage-dependent L-type calcium channel. It is also known as alpha subunit Cav1.3. The known protein is described in Example 19.

[0427] The structure of the splice variant according to the present invention features a unique tail, as compared to the known protein sequence. An alignment is provided at the end of this section, while the comparison between the two sequences is described below.

[0428] According to preferred embodiments of the present invention, there is provided an isolated chimeric polypeptide encoding for HUMCACH1A_P4, comprising a first amino acid sequence being at least 90% homologous to (SEQ ID NO: 181) MMMMMMMKKMQHQRQQQADHANEANYARGTRLPLSGEGPTSQPNSSKQTVLSWQAAIDAARQAKAAQTMSTSAPPPVGSLSQRKRQQYAKSKKQGNSSNSRPARALFCLSLNNPIRRACISIVEWKPFDIFILLAIFANCVALAIYIPFPEDDSNSTNHNLEKVEYAFLIIFTVETFLKIIAYGLLLHPNAYVRNGWNLLDFVIVIVGLFSVILEQLTKETEGGNHSSGKSGGFDVKALRAFRVLRPLRLVSGVPSLQVVLNSIIKAMVPLLHIALLVLFVIIIYAIIGLELFIGKMHKTCFFADSDIVAEEDPAPCAFSGNGRQCTANGTECRSGWVGPNGGITNFDNFAFAMLTVFQCITMEGWTDVLYWMNDAMGFELPWVYFVSLVIFGSFFVLNLVLGVLSG corresponding to amino acids 1-407 of CCAD_HUMAN, which also corresponds to amino acids 1-407 of HUMCACH1A_P4, and a second amino acid sequence being at least 70%, optionally at least 80%, preferably at least 85%, more preferably at least 90% and most preferably at least 95% homologous to a polypeptide having the sequence HSGSRL corresponding to amino acids 408-413 of HUMCACH1A_P4, wherein said first amino acid sequence and second amino acid sequence are contiguous and in a sequential order.

[0429] According to preferred embodiments of the present invention, there is provided an isolated polypeptide encoding for a tail of HUMCACH1A_P4, comprising a polypeptide being at least 70%, optionally at least about 80%, preferably at least about 85%, more preferably at least about 90% and most preferably at least about 95% homologous to the sequence HSGSRL in HUMCACH1A_P4.

[0430] Domains affected by alternative splicing include: the cytoplasmic loop between domain I and domain II; the S1 transmembrane domain of domain II; the extracellular loop between S1 and S2 transmembrane domains of domain II; the S2 transmembrane domain of domain II; the extracellular loop between S2 and S3 transmembrane domains of domain II; the S3 transmembrane domain of domain II; the extracellular loop between S3 and S4 transmembrane domains of domain II; the S4 transmembrane domain of domain II; the extracellular loop between S4 and S5 transmembrane domains of domain II; the S5 transmembrane domain of domain II; the pore loop region between S5 and S6 transmembrane domains of domain II; the S6 transmembrane domain of domain II; the cytoplasmic loop between domain II and domain III; the S1 transmembrane domain of domain III; the extracellular loop between S1 and S2 transmembrane domains of domain III; the S2 transmembrane domain of domain III; the extracellular loop between S2 and S3 transmembrane domains of domain III; the S3 transmembrane domain of domain III; the extracellular loop between S3 and S4 transmembrane domains of domain III; the S4 transmembrane domain of domain III; the extracellular loop between S4 and S5 transmembrane domains of domain III; the S5 transmembrane domain of domain III; the pore loop region between S5 and S6 transmembrane domains of domain III; the S6 transmembrane domain of domain III; the cytoplasmic loop between domain III and domain IV; the S1 transmembrane domain of domain IV; the extracellular loop between S1 and S2 transmembrane domains of domain IV; the S2 transmembrane domain of domain IV; the extracellular loop between S2 and S3 transmembrane domains of domain IV; the S3 transmembrane domain of domain IV; the extracellular loop between S3 and S4 transmembrane domains of domain IV; the S4 transmembrane domain of domain IV; the extracellular loop between S4 and S5 transmembrane domains of domain IV; the S5 transmembrane domain of domain IV; the pore loop region between S5 and S6 transmembrane domains of domain IV; the S6 transmembrane domain of domain IV the cytoplasmic C-terminus region of the protein.

[0431] The potential effect of such very short (one or two domain) variants is described above with regard to Example 19. From the above description of the function of variants lacking several domains, it is expected that the variant will function as a down regulation of a known functional channel protein (in particular of this alpha subunit type). Sequence name: CCAD_HUMAN

documentation:

of: HUMCACH1A_P4 (residues 1-407 of SEQ ID NO: 20)×CCAD_HUMAN (SEQ ID NO: 182). . .

segment 1/1:

[0432] Quality: 3976.00

Escore: 0

Matching length: 407 Total

length: 407

Matching Percent Similarity: 100.00 Matching Percent

Identity: 100.00

Total Percent Similarity: 100.00 Total Percent

Identity: 100.00

[0433] Gaps: 0

| | . . . . . | |
|---|---|---|
| 1 | MMMMMMMKKMQHQRQQQADHANEANYARGTRLPLSGEGPTSQPNSSKQTV | 50 |
| | \|\|\|\|\|\|\|\|\|\|\|\|\|\|\|\|\|\|\|\|\|\|\|\|\|\|\|\|\|\|\|\|\|\|\|\|\|\|\|\|\|\|\|\|\|\|\|\|\|\| | |
| 1 | MMMMMMMKKMQHQRQQQADHANEANYARGTRLPLSGEGPTSQPNSSKQTV | 50 |
| | . . . . . | |
| 51 | LSWQAAIDAARQAKAAQTMSTSAPPPVGSLSQRKRQQYAKSKKQGNSSNS | 100 |
| | \|\|\|\|\|\|\|\|\|\|\|\|\|\|\|\|\|\|\|\|\|\|\|\|\|\|\|\|\|\|\|\|\|\|\|\|\|\|\|\|\|\|\|\|\|\|\|\|\|\| | |
| 51 | LSWQAAIDAARQAKAAQTMSTSAPPPVGSLSQRKRQQYAKSKKQGNSSNS | 100 |
| | . . . . . | |
| 101 | RPARALFCLSLNNPIRRACISIVEWKPFDIFILLAIFANCVALAIYIPFP | 150 |
| | \|\|\|\|\|\|\|\|\|\|\|\|\|\|\|\|\|\|\|\|\|\|\|\|\|\|\|\|\|\|\|\|\|\|\|\|\|\|\|\|\|\|\|\|\|\|\|\|\|\| | |
| 101 | RPARALFCLSLNNPIRRACISIVEWKPFDIFILLAIFANCVALAIYIPFP | 150 |
| | . . . . . | |
| 151 | EDDSNSTNHNLEKVEYAFLIIFTVETFLKIIAYGLLLHPNAYVRNGWNLL | 200 |
| | \|\|\|\|\|\|\|\|\|\|\|\|\|\|\|\|\|\|\|\|\|\|\|\|\|\|\|\|\|\|\|\|\|\|\|\|\|\|\|\|\|\|\|\|\|\|\|\|\|\| | |
| 151 | EDDSNSTNHNLEKVEYAFLIIFTVETFLKIIAYGLLLHPNAYVRNGWNLL | 200 |
| | . . . . . | |
| 201 | DFVIVIVGLFSVILEQLTKETEGGNHSSGKSGGFDVKALRAFRVLRPLRL | 250 |
| | \|\|\|\|\|\|\|\|\|\|\|\|\|\|\|\|\|\|\|\|\|\|\|\|\|\|\|\|\|\|\|\|\|\|\|\|\|\|\|\|\|\|\|\|\|\|\|\|\|\| | |
| 201 | DFVIVIVGLFSVILEQLTKETEGGNHSSGKSGGFDVKALRAFRVLRPLRL | 250 |
| | . . . . . | |
| 251 | VSGVPSLQVVLNSIIKAMVPLLHIALLVLFVIIIYAIIGLELFIGKMHKT | 300 |
| | \|\|\|\|\|\|\|\|\|\|\|\|\|\|\|\|\|\|\|\|\|\|\|\|\|\|\|\|\|\|\|\|\|\|\|\|\|\|\|\|\|\|\|\|\|\|\|\|\|\| | |
| 251 | VSGVPSLQVVLNSIIKAMVPLLHIALLVLFVIIIYAIIGLELFIGKMHKT | 300 |
| | . . . . . | |
| 301 | CFFADSDIVAEEDPAPCAFSGNGRQCTQNGTECRSGWVGPNGGITNFDNF | 350 |
| | \|\|\|\|\|\|\|\|\|\|\|\|\|\|\|\|\|\|\|\|\|\|\|\|\|\|\|\|\|\|\|\|\|\|\|\|\|\|\|\|\|\|\|\|\|\|\|\|\|\| | |
| 301 | CFFADSDIVAEEDPAPCAFSGNGRQCTQNGTECRSGWVGPNGGITNFDNF | 350 |
| | . . . . . | |
| 351 | AFAMLTVFQCITMEGWTDVLYWMNDAMGFELPWVYFVSLVIFGSFFVLNL | 400 |
| | \|\|\|\|\|\|\|\|\|\|\|\|\|\|\|\|\|\|\|\|\|\|\|\|\|\|\|\|\|\|\|\|\|\|\|\|\|\|\|\|\|\|\|\|\|\|\|\|\|\| | |
| 351 | AFAMLTVFQCITMEGWTDVLYWMNDAMGFELPWVYFVSLVIFGSFFVLNL | 400 |
| 401 | VLGVLSG | 407 |
| | \|\|\|\|\|\|\| | |
| 401 | VLGVLSG | 407 |

### EXAMPLE 22

[0434] This Example relates to the variant HUMCACH1A_P3 (SEQ ID NO:22; the nucleic acid sequence is given by SEQ ID NO:44), which is a variant alpha 1 subunit according to the present invention, and more specifically, is a splice variant of the known protein CCAD_HUMAN, which is encoded by the CACNA1D gene. This alpha subunit is the alpha 1D subunit, which forms the voltage-dependent L-type calcium channel. It is also known as alpha subunit Cav1.3. The known protein is described in Example 19.

[0435] The structure of the splice variant according to the present invention features a skipped exon, as compared to the known protein sequence. An alignment is provided at the end of this section, while the comparison between the two sequences is described below.

[0436] According to preferred embodiments of the present invention, there is provided an isolated chimeric polypeptide encoding for HUMCACH1A_P3, comprising a first amino acid sequence being at least 90% homologous to (SEQ ID NO: 183) MMMMMMMKKMQHQRQQQADHANEANYARGTRLPLSGEGPTSQPNSSKQTVLSWQAAIDAARQAKAAQTMSTSAPPPVGSLSQRKRQQYAKSKKQGNSSNSRPARALFCLSLNNPIRRACISIVEWKPFDIFILLAIFANCVALAIYIPFPEDDSNSTNHNLEKVEYAFLIIFTVETFLKIIAYGLLLHPNAYVRNGWNLLDFVIVIVGLFSVILEQLTKETEGGNHSSGKSGGFDVKALRAFRVLRPLRLVSGVPSLQVVLNSIIKAMVPLLHIALLVLFVIIIYAIIGLELFIGKMHKTCFFADSDIVAEEDPAPCAFSGNGRQCTANGTECRSGWVGPNGGITNFDNFAFAMLTVFQCITMEGWTDVLYWMNDAMGFELPWVYFVSLVIFGSFFVLNLVLGVLSGEFSKEREKAKARGDFQKLREKQQLEEDLKGYLDWITQAEDIDPENEEEGGEEGKRNTSMPTSETESVNTENVSGEGENRGCCGSLCQAISKSKLSRRWRRWNRFNRRRCRAAVKSVTFYWLVIVLVFLNTLTISSEHYNQPDWLTQIQDIANKVLLALFTCEMLVKMYSLGLQAYFVSLFNRFDCFVVCGGITETILVELEIMSPLGISVFRCVRLLRIFKVTRHWTSL corresponding to amino acids 1-636 of CCAD_HUMAN, which also corresponds to amino acids 1-636 of HUMCACH1A_P3, a bridging amino acid S corresponding to amino acid 637 of HUMCACH1A_P3, a second amino acid sequence being at least 90% homologous to (SEQ ID NO: 191) NLVASLLNSMKS corresponding to amino acids 638-649 of CCAD_HUMAN, which also corresponds to amino acids 638-649 of HUMCACH1A_P3, a bridging amino acid I corresponding to amino acid 650 of HUMCACH1A_P3, a third amino acid sequence being at least 90% homologous to (SEQ ID NO: 184) ASLLLLLFLFIIIFSLLGMQLFGGKFNFDETQTKRSTFDNFPQALLTVFQILTGEDWNAVMYDGIMAYGGPSSSGMIVCIYFIILFICGNYILLNVFLAIAVDNLADAESLNTAQKEEAEEKERKKIARKESLENKKNNKPEVNQIANSDNKVTIDDYREEDEDKDPYPPCDVPVGEEEEEEEEDEPEVPAGPRPRRISELNMKEKIAPIPEGSAFFILSKTNPIRVGCHKLINHHIFTNLILVFIMLSSAALAAEDPIRSHSFRNTILGYFDYAFTAIFTVEILLKMTTFGAFLHKGAFCRNYFNLLDMLVVGVSLVSFGIQSSAISVVKILRVLRVLRPLRAINRAKGLKHVVQCVFVAIRTIGNIMIVTTLLQFMFACIGVQLFKGKFYRCTDEAKSNPEECRGLFILYKDGDVDSPVVRERIWQNSDFNFDNVLSAMMALFTVSTFEGWPALLYKAIDSNGENIGPIYNHRVEISIFFIIYIIIVAFFMMNIFVGFVIVTFQEQGEKEYKNCELDKNQRQCVEYALKARPLRRYIPKNPYQYKFWYVVNSSPFEYMMFVLIMLNTLCLAMQHYEQSKMFNDAMDILNMVFTGVFTVEMVLKVIAFKPKGYFSDAWNTFDSLIVIGSIIDVALSEADPTESENVPVPTATPGNSEESNRISITFFRLFRVMRLVKLLSRGEGIRTLLWTFIK corresponding to amino acids 651-1345 of CCAD_HUMAN, which also corresponds to amino acids 651-1345 of HUMCACH1A_P3, a bridging amino acid S corresponding to amino acid 1346 of HUMCACH1A_P3, a fourth amino acid sequence being at least 90% homologous to (SEQ ID NO: 185) FQALPYVALLIAMLFFIYAVIGMQMFGKVAMRDNNQNNFQTFPQAVLLLFRCATGEAWQEIMLACLPGKLCDPESDYNPGEE corresponding to amino acids 1347-1432 of CCAD_HUMAN, which also corresponds to amino acids 1347-1432 of HUMCACH1A_P3, a bridging amino acid Y corresponding to amino acid 1433 of HUMCACH1A_P3, a fifth amino acid sequence being at least 90% homologous to (SEQ ID NO: 186) TCGSNFAIVYFISFYMLCAFLIINLFVAVIMDNFDYLTRDWSILGPHHLDEFKRIWSEYDPAKGRIKHLDVVTLLRRIQPPLGFGKLCPHRVACKRLVAMNMPLNSDGTVMFNATLFALVRTALKIKTEGNLEQANEELRAVIKKIWKKTSMKLLDQVVPPAGDDEVTVGKFYATFLIQDYFRKFKKRKEQGLVGKYPAKNTTIALQAGLRTLHDIGPEIRRAISCDLQDDEPEETKREEEDDVFKRNGALLGNHVNHVNSDRRDSLQQTNTTHRPLHVQRPSIPPASDTEKPLFPPAGNSVCHNHHNHNSIGKQVPTSTNANLNNANMSKAAHGKRPSIGNLEHVSENGHHSSHKHDREPQRRSSVK corresponding to amino acids 1434-1802 of CCAD_HUMAN, which also corresponds to amino acids 1434-1802 of HUMCACH1A_P3, a sixth amino acid sequence being at least 90% homologous to (SEQ ID NO: 187) RSDSGDEQLPTICREDPEIHGYFRDPHCLGEQEYFSSEECYEDDSSPTWSRQNYGYYSRYPGRNIDSERPRGYHHPQGFLEDDDSPVCYDSRRSPRRRLLPPTPASHRRSSFNFECLRRQSSQEEVPSSPIFPHRTALPLHLMQQQIMAVAGLDSSKAQKYSPSHSTRSWATPPATPPYRDWTPCYTPLIQVEQSEALDQVNGSLPSLHRSSWYTDEPDISYRTFTPASLTVPSSFRNKNSDKQRSADSLVEAVLISEGLGRYARDPKFVSATKHEIADACDLTIDEMESAASTLLNGNVRPRANGDVGPLSHRQDYELQDFGPGYSDEEPDPGRDEEDLADEMICITTL corresponding to amino acids 1812-2161 of CCAD_HUMAN, which also corresponds to amino acids 1803-2152 of HUMCACH1A_P3, wherein said first amino acid sequence, bridging amino acid, second amino acid sequence, bridging amino acid, third amino acid sequence, bridging amino acid, fourth amino acid sequence, bridging amino acid, fifth amino acid sequence and sixth amino acid sequence are contiguous and in a sequential order.

[0437] According to preferred embodiments of the present invention, there is provided an isolated chimeric polypeptide encoding for an edge portion of HUMCACH1A_P3, comprising a polypeptide having a length “n”, wherein n is at least about 10 amino acids in length, optionally at least about 20 amino acids in length, preferably at least about 30 amino acids in length, more preferably at least about 40 amino acids in length and most preferably at least about 50 amino acids in length, wherein at least two amino acids comprise KR, having a structure as follows: a sequence starting from any of amino acid numbers 1802−x to 1802; and ending at any of amino acid numbers 1803+((n−2)−x), in which x varies from 0 to n−2. Domains affected by alternative splicing include the cytoplasmic C-terminus region of the protein.

[0438] As the C-terminus becomes shorter, the current amplitude increases, as does the calcium-dependent inactivation. In neuronal Cav1.3 channels, replacement of exon 41 by a mutually exclusive exon 41a leads to an early stop codon, truncating over 500 amino acid residues encoded by exons 42-49, which results in a twofold increase of current amplitude without change of voltage dependence of gating.

[0439] From the above description of the effect of changes to the C-terminus domain of this variant, it is expected that the variant will have an increase of current amplitude without change of voltage dependence of gating. It is also expected to modulate the Ca+2-dependent inactivation of the channel.

Sequence name: CCAD_HUMAN

documentation:

of: HUMCACH1A_P3 (SEQ ID NO: 22)×CCAD_HUMAN (SEQ ID NO: 188) . . .

segment 1/1:

[0440] Quality: 21052.00

Escore: 0

Matching length: 2152 Total

length: 2161

Matching Percent Similarity: 9986 Matching Percent

Identity: 99.81

Total Percent Similarity: 99.44 Total Percent

Identity: 99.40

[0441] Gaps: 1

| | . . . . . | |
|---|---|---|
| 1 | MMMMMMMKKMQHQRQQQADHANEANYARGTRLPLSGEGPTSQPNSSKQTV | 50 |
| | \|\|\|\|\|\|\|\|\|\|\|\|\|\|\|\|\|\|\|\|\|\|\|\|\|\|\|\|\|\|\|\|\|\|\|\|\|\|\|\|\|\|\|\|\|\|\|\|\|\| | |
| 1 | MMMMMMMKKMQHQRQQQADHANEANYARGTRLPLSGEGPTSQPNSSKQTV | 50 |
| | . . . . . | |
| 51 | LSWQAAIDAARQAKAAQTMSTSAPPPVGSLSQRKRQQYAKSKKQGNSSNS | 100 |
| | \|\|\|\|\|\|\|\|\|\|\|\|\|\|\|\|\|\|\|\|\|\|\|\|\|\|\|\|\|\|\|\|\|\|\|\|\|\|\|\|\|\|\|\|\|\|\|\|\|\| | |
| 51 | LSWQAAIDAARQAKAAQTMSTSAPPPVGSLSQRKRQQYAKSKKQGNSSNS | 100 |
| | . . . . . | |
| 101 | RPARALFCLSLNNPIRRACISIVEWKPFDIFILLAIFANCVALAIYIPFP | 150 |
| | \|\|\|\|\|\|\|\|\|\|\|\|\|\|\|\|\|\|\|\|\|\|\|\|\|\|\|\|\|\|\|\|\|\|\|\|\|\|\|\|\|\|\|\|\|\|\|\|\|\| | |
| 101 | RPARALFCLSLNNPIRRACISIVEWKPFDIFILLAIFANCVALAIYIPFP | 150 |
| | . . . . . | |
| 151 | EDDSNSTNHNLEKVEYAFLIIFTVETFLKIIAYGLLLHPNAYVRNGWNLL | 200 |
| | \|\|\|\|\|\|\|\|\|\|\|\|\|\|\|\|\|\|\|\|\|\|\|\|\|\|\|\|\|\|\|\|\|\|\|\|\|\|\|\|\|\|\|\|\|\|\|\|\|\| | |
| 151 | EDDSNSTNHNLEKVEYAFLIIFTVETFLKIIAYGLLLHPNAYVRNGWNLL | 200 |
| | . . . . . | |
| 201 | DFVIVIVGLFSVILEQLTKETEGGNHSSGKSGGFDVKALRAFRVLRPLRL | 250 |
| | \|\|\|\|\|\|\|\|\|\|\|\|\|\|\|\|\|\|\|\|\|\|\|\|\|\|\|\|\|\|\|\|\|\|\|\|\|\|\|\|\|\|\|\|\|\|\|\|\|\| | |
| 201 | DFVIVIVGLFSVILEQLTKETEGGNHSSGKSGGFDVKALRAFRVLRPLRL | 250 |
| | . . . . . | |
| 251 | VSGVPSLQVVLNSIIKAMVPLLHIALLVLFVIIIYAIIGLELFIGKMHKT | 300 |
| | \|\|\|\|\|\|\|\|\|\|\|\|\|\|\|\|\|\|\|\|\|\|\|\|\|\|\|\|\|\|\|\|\|\|\|\|\|\|\|\|\|\|\|\|\|\|\|\|\|\| | |
| 251 | VSGVPSLQVVLNSIIKAMVPLLHIALLVLFVIIIYAIIGLELFIGKMHKT | 300 |
| | . . . . . | |
| 301 | CFFADSDIVAEEDPAPCAFSGNGRQCTANGTECRSGWVGPNGGITNFDNF | 350 |
| | \|\|\|\|\|\|\|\|\|\|\|\|\|\|\|\|\|\|\|\|\|\|\|\|\|\|\|\|\|\|\|\|\|\|\|\|\|\|\|\|\|\|\|\|\|\|\|\|\|\| | |
| 301 | CFFADSDIVAEEDPAPCAFSGNGRQCTANGTECRSGWVGPNGGITNFDNF | 350 |
| | . . . . . | |
| 351 | AFAMLTVFQCITMEGWTDVLYWMNDAMGFELPWVYFVSLVIFGSFFVLNL | 400 |
| | \|\|\|\|\|\|\|\|\|\|\|\|\|\|\|\|\|\|\|\|\|\|\|\|\|\|\|\|\|\|\|\|\|\|\|\|\|\|\|\|\|\|\|\|\|\|\|\|\|\| | |
| 351 | AFAMLTVFQCITMEGWTDVLYWMNDAMGFELPWVYFVSLVIFGSFFVLNL | 400 |
| | . . . . . | |
| 401 | VLGVLSGEFSKEREKAKARGDFQKLREKQQLEEDLKGYLDWITQAEDIDP | 450 |
| | \|\|\|\|\|\|\|\|\|\|\|\|\|\|\|\|\|\|\|\|\|\|\|\|\|\|\|\|\|\|\|\|\|\|\|\|\|\|\|\|\|\|\|\|\|\|\|\|\|\| | |
| 401 | VLGVLSGEFSKEREKAKARGDFQKLREKQQLEEDLKGYLDWITQAEDIDP | 450 |
| | . . . . . | |
| 451 | ENEEEGGEEGKRNTSMPTSETESVNTENVSGEGENRGCCGSLCQAISKSK | 500 |
| | \|\|\|\|\|\|\|\|\|\|\|\|\|\|\|\|\|\|\|\|\|\|\|\|\|\|\|\|\|\|\|\|\|\|\|\|\|\|\|\|\|\|\|\|\|\|\|\|\|\| | |
| 451 | ENEEEGGEEGKRNTSMPTSETESVNTENVSGEGENRGCCGSLCQAISKSK | 500 |
| | . . . . . | |
| 501 | LSRRWRRWNRFNRRRCRAAVKSVTFYWLVIVLVFLNTLTISSEHYNQPDW | 550 |
| | \|\|\|\|\|\|\|\|\|\|\|\|\|\|\|\|\|\|\|\|\|\|\|\|\|\|\|\|\|\|\|\|\|\|\|\|\|\|\|\|\|\|\|\|\|\|\|\|\|\| | |
| 501 | LSRRWRRWNRFNRRRCRAAVKSVTFYWLVIVLVFLNTLTISSEHYNQPDW | 550 |
| | . . . . . | |
| 551 | LTQIQDIANKVLLALFTCEMLVKMYSLGLQAYFVSLFNRFDCFVVCGGIT | 600 |
| | \|\|\|\|\|\|\|\|\|\|\|\|\|\|\|\|\|\|\|\|\|\|\|\|\|\|\|\|\|\|\|\|\|\|\|\|\|\|\|\|\|\|\|\|\|\|\|\|\|\| | |
| 551 | LTQIQDIANKVLLALFTCEMLVKMYSLGLQAYFVSLFNRFDCFVVCGGIT | 600 |
| | . . . . . | |
| 601 | ETILVELEIMSPLGISVFRCVRLLRIFKVTRHWTSLSNLVASLLNSMKSI | 650 |
| | \|\|\|\|\|\|\|\|\|\|\|\|\|\|\|\|\|\|\|\|\|\|\|\|\|\|\|\|\|\|\|\|\|\|\|\| \|\|\|\|\|\|\|\|\|\|\|\| | |
| 601 | ETILVELEIMSPLGISVFRCVRLLRIFKVTRHWTSLCNLVASLLNSMKSS | 650 |
| | . . . . . | |
| 651 | ASLLLLLFLFIIIFSLLGMQLFGGKFNFDETQTKRSTFDNFPQALLTVFQ | 700 |
| | \|\|\|\|\|\|\|\|\|\|\|\|\|\|\|\|\|\|\|\|\|\|\|\|\|\|\|\|\|\|\|\|\|\|\|\|\|\|\|\|\|\|\|\|\|\|\|\|\|\| | |
| 651 | ASLLLLLFLFIIIFSLLGMQLFGGKFNFDETQTKRSTFDNFPQALLTVFQ | 700 |
| | . . . . . | |
| 701 | ILTGEDWNAVMYDGIMAYGGPSSSGMIVCIYFIILFICGNYILLNVFLAI | 750 |
| | \|\|\|\|\|\|\|\|\|\|\|\|\|\|\|\|\|\|\|\|\|\|\|\|\|\|\|\|\|\|\|\|\|\|\|\|\|\|\|\|\|\|\|\|\|\|\|\|\|\| | |
| 701 | ILTGEDWNAVMYDGIMAYGGPSSSGMIVCIYFIILFICGNYILLNVFLAI | 750 |
| | . . . . . | |
| 751 | AVDNLADAESLNTAQKEEAEEKERKKIARKESLENKKNNKPEVNQIANSD | 800 |
| | \|\|\|\|\|\|\|\|\|\|\|\|\|\|\|\|\|\|\|\|\|\|\|\|\|\|\|\|\|\|\|\|\|\|\|\|\|\|\|\|\|\|\|\|\|\|\|\|\|\| | |
| 751 | AVDNLADAESLNTAQKEEAEEKERKKIARKESLENKKNNKPEVNQIANSD | 800 |
| | . . . . . | |
| 801 | NKVTIDDYREEDEDKDPYPPCDVPVGEEEEEEEEDEPEVPAGPRPRRISE | 850 |
| | \|\|\|\|\|\|\|\|\|\|\|\|\|\|\|\|\|\|\|\|\|\|\|\|\|\|\|\|\|\|\|\|\|\|\|\|\|\|\|\|\|\|\|\|\|\|\|\|\|\| | |
| 801 | NKVTIDDYREEDEDKDPYPPCDVPVGEEEEEEEEDEPEVPAGPRPRRISE | 850 |
| | . . . . . | |
| 851 | LNMKEKIAPIPEGSAFFILSKTNPIRVGCHKLINHHIFTNLILVFIMLSS | 900 |
| | \|\|\|\|\|\|\|\|\|\|\|\|\|\|\|\|\|\|\|\|\|\|\|\|\|\|\|\|\|\|\|\|\|\|\|\|\|\|\|\|\|\|\|\|\|\|\|\|\|\| | |
| 851 | LNMKEKIAPIPEGSAFFILSKTNPIRVGCHKLINHHIFTNLILVFIMLSS | 900 |
| | . . . . . | |
| 901 | AALAAEDPIRSHSFRNTILGYFDYAFTAIFTVEILLKMTTFGAFLHKGAF | 950 |
| | \|\|\|\|\|\|\|\|\|\|\|\|\|\|\|\|\|\|\|\|\|\|\|\|\|\|\|\|\|\|\|\|\|\|\|\|\|\|\|\|\|\|\|\|\|\|\|\|\|\| | |
| 901 | AALAAEDPIRSHSFRNTILGYFDYAFTAIFTVEILLKMTTFGAFLHKGAF | 950 |
| | . . . . . | |
| 951 | CRNYFNLLDMLVVGVSLVSFGIQSSAISVVKILRVLRVLRPLRAINRAKG | 1000 |
| | \|\|\|\|\|\|\|\|\|\|\|\|\|\|\|\|\|\|\|\|\|\|\|\|\|\|\|\|\|\|\|\|\|\|\|\|\|\|\|\|\|\|\|\|\|\|\|\|\|\| | |
| 951 | CRNYFNLLDMLVVGVSLVSFGIQSSAISVVKILRVLRVLRPLRAINRAKG | 1000 |
| | . . . . . | |
| 1001 | LKHVVQCVFVAIRTIGNIMIVTTLLQFMFACIGVQLFKGKFYRCTDEAKS | 1050 |
| | \|\|\|\|\|\|\|\|\|\|\|\|\|\|\|\|\|\|\|\|\|\|\|\|\|\|\|\|\|\|\|\|\|\|\|\|\|\|\|\|\|\|\|\|\|\|\|\|\|\| | |
| 1001 | LKHVVQCVFVAIRTIGNIMIVTTLLQFMFACIGVQLFKGKFYRCTDEAKS | 1050 |
| | . . . . . | |
| 1051 | NPEECRGLFILYKDGDVDSPVVRERIWQNSDFNFDNVLSAMMALFTVSTF | 1100 |
| | \|\|\|\|\|\|\|\|\|\|\|\|\|\|\|\|\|\|\|\|\|\|\|\|\|\|\|\|\|\|\|\|\|\|\|\|\|\|\|\|\|\|\|\|\|\|\|\|\|\| | |
| 1051 | NPEECRGLFILYKDGDVDSPVVRERIWQNSDFNFDNVLSAMMALFTVSTF | 1100 |
| | . . . . . | |
| 1101 | EGWPALLYKAIDSNGENIGPIYNHRVEISIFFIIYIIIVAFFMMNIFVGF | 1150 |
| | \|\|\|\|\|\|\|\|\|\|\|\|\|\|\|\|\|\|\|\|\|\|\|\|\|\|\|\|\|\|\|\|\|\|\|\|\|\|\|\|\|\|\|\|\|\|\|\|\|\| | |
| 1101 | EGWPALLYKAIDSNGENIGPIYNHRVEISIFFIIYIIIVAFFMMNIFVGF | 1150 |
| | . . . . . | |
| 1151 | VIVTFQEQGEKEYKNCELDKNQRQCVEYALKARPLRRYIPKNPYQYKFWY | 1200 |
| | \|\|\|\|\|\|\|\|\|\|\|\|\|\|\|\|\|\|\|\|\|\|\|\|\|\|\|\|\|\|\|\|\|\|\|\|\|\|\|\|\|\|\|\|\|\|\|\|\|\| | |
| 1151 | VIVTFQEQGEKEYKNCELDKNQRQCVEYALKARPLRRYIPKNPYQYKFWY | 1200 |
| | . . . . . | |
| 1201 | VVNSSPFEYMMFVLIMLNTLCLAMQHYEQSKMFNDAMDILNMVFTGVFTV | 1250 |
| | \|\|\|\|\|\|\|\|\|\|\|\|\|\|\|\|\|\|\|\|\|\|\|\|\|\|\|\|\|\|\|\|\|\|\|\|\|\|\|\|\|\|\|\|\|\|\|\|\|\| | |
| 1201 | VVNSSPFEYMMFVLIMLNTLCLAMQHYEQSKMFNDAMDILNMVFTGVFTV | 1250 |
| | . . . . . | |
| 1251 | EMVLKVIAFKPKGYFSDAWNTFDSLIVIGSIIDVALSEADPTESENVPVP | 1300 |
| | \|\|\|\|\|\|\|\|\|\|\|\|\|\|\|\|\|\|\|\|\|\|\|\|\|\|\|\|\|\|\|\|\|\|\|\|\|\|\|\|\|\|\|\|\|\|\|\|\|\| | |
| 1251 | EMVLKVIAFKPKGYFSDAWNTFDSLIVIGSIIDVALSEADPTESENVPVP | 1300 |
| | . . . . . | |
| 1301 | TATPGNSEESNRISITFFRLFRVMRLVKLLSRGEGIRTLLWTFIKSFQAL | 1350 |
| | \|\|\|\|\|\|\|\|\|\|\|\|\|\|\|\|\|\|\|\|\|\|\|\|\|\|\|\|\|\|\|\|\|\|\|\|\|\|\|\|\|\|\|\|\|\|\|\|\|\| | |
| 1301 | TATPGNSEESNRISITFFRLFRVMRLVKLLSRGEGIRTLLWTFIKSFQAL | 1350 |
| | . . . . . | |
| 1351 | PYVALLIAMLFFIYAVIGMQMFGKVAMRDNNQINRNNNFQTFPQAVLLLF | 1400 |
| | \|\|\|\|\|\|\|\|\|\|\|\|\|\|\|\|\|\|\|\|\|\|\|\|\|\|\|\|\|\|\|\|\|\|\|\|\|\|\|\|\|\|\|\|\|\|\|\|\|\| | |
| 1351 | PYVALLIAMLFFIYAVIGMQMFGKVAMRDNNQINRNNNFQTFPQAVLLLF | 1400 |
| | . . . . . | |
| 1401 | RCATGEAWQEIMLACLPGKLCDPESDYNPGEEYTCGSNFAIVYFISFYML | 1450 |
| | \|\|\|\|\|\|\|\|\|\|\|\|\|\|\|\|\|\|\|\|\|\|\|\|\|\|\|\|\|\|\|\|\|\|\|\|\|\|\|\|\|\|\|\|\|\|\|\|\|\| | |
| 1401 | RCATGEAWQEIMLACLPGKLCDPESDYNPGEEYTCGSNFAIVYFISFYML | 1450 |
| | . . . . . | |
| 1451 | CAFLIINLFVAVIMDNFDYLTRDWSILGPHHLDEFKRIWSEYDPEAKGRI | 1500 |
| | \|\|\|\|\|\|\|\|\|\|\|\|\|\|\|\|\|\|\|\|\|\|\|\|\|\|\|\|\|\|\|\|\|\|\|\|\|\|\|\|\|\|\|\|\|\|\|\|\|\| | |
| 1451 | CAFLIINLFVAVIMDNFDYLTRDWSILGPHHLDEFKRIWSEYDPEAKGRI | 1500 |
| | . . . . . | |
| 1501 | KHLDVVTLLRRIQPPLGFGKLCPHRVACKRLVAMNMPLNSDGTVMFNATL | 1550 |
| | \|\|\|\|\|\|\|\|\|\|\|\|\|\|\|\|\|\|\|\|\|\|\|\|\|\|\|\|\|\|\|\|\|\|\|\|\|\|\|\|\|\|\|\|\|\|\|\|\|\| | |
| 1501 | KHLDVVTLLRRIQPPLGFGKLCPHRVACKRLVAMNMPLNSDGTVMFNATL | 1550 |
| | . . . . . | |
| 1551 | FALVRTALKIKTEGNLEQANEELRAVIKKIWKKTSMKLLDQVVPPAGDDE | 1600 |
| | \|\|\|\|\|\|\|\|\|\|\|\|\|\|\|\|\|\|\|\|\|\|\|\|\|\|\|\|\|\|\|\|\|\|\|\|\|\|\|\|\|\|\|\|\|\|\|\|\|\| | |
| 1551 | FALVRTALKIKTEGNLEQANEELRAVIKKIWKKTSMKLLDQVVPPAGDDE | 1600 |
| | . . . . . | |
| 1601 | VTVGKFYATFLIQDYFRKFKKRKEQGLVGKYPAKNTTIALQAGLRTLHDI | 1650 |
| | \|\|\|\|\|\|\|\|\|\|\|\|\|\|\|\|\|\|\|\|\|\|\|\|\|\|\|\|\|\|\|\|\|\|\|\|\|\|\|\|\|\|\|\|\|\|\|\|\|\| | |
| 1601 | VTVGKFYATFLIQDYFRKFKKRKEQGLVGKYPAKNTTIALQAGLRTLHDI | 1650 |
| | . . . . . | |
| 1651 | GPEIRRAISCDLQDDEPEETKREEEDDVFKRNGALLGNHVNHVNSDRRDS | 1700 |
| | \|\|\|\|\|\|\|\|\|\|\|\|\|\|\|\|\|\|\|\|\|\|\|\|\|\|\|\|\|\|\|\|\|\|\|\|\|\|\|\|\|\|\|\|\|\|\|\|\|\| | |
| 1651 | GPEIRRAISCDLQDDEPEETKREEEDDVFKRNGALLGNHVNHVNSDRRDS | 1700 |
| | . . . . . | |
| 1701 | LQQTNTTHRPLHVQRPSIPPASDTEKPLFPPAGNSVCHNHHNHNSIGKQV | 1750 |
| | \|\|\|\|\|\|\|\|\|\|\|\|\|\|\|\|\|\|\|\|\|\|\|\|\|\|\|\|\|\|\|\|\|\|\|\|\|\|\|\|\|\|\|\|\|\|\|\|\|\| | |
| 1701 | LQQTNTTHRPLHVQRPSIPPASDTEKPLFPPAGNSVCHNHHNHNSIGKQV | 1750 |
| | . . . . . | |
| 1751 | PTSTNANLNNANMSKAAHGKRPSIGNLEHVSENGHHSSHKHDREPQRRSS | 1800 |
| | \|\|\|\|\|\|\|\|\|\|\|\|\|\|\|\|\|\|\|\|\|\|\|\|\|\|\|\|\|\|\|\|\|\|\|\|\|\|\|\|\|\|\|\|\|\|\|\|\|\| | |
| 1751 | PTSTNANLNNANMSKAAHGKRPSIGNLEHVSENGHHSSHKHDREPQRRSS | 1800 |
| | . . . . . | |
| 1801 | VK.........RSDSGDEQLPTICREDPEIHGYFRDPHCLGEQEYFSSEE | 1841 |
| | \|\| \|\|\|\|\|\|\|\|\|\|\|\|\|\|\|\|\|\|\|\|\|\|\|\|\|\|\|\|\|\|\|\|\|\|\|\|\|\|\| | |
| 1801 | VKRTRYYETYIRSDSGDEQLPTICREDPEIHGYFRDPHCLGEQEYFSSEE | 1850 |
| | . . . . . | |
| 1842 | CYEDDSSPTWSRQNYGYYSRYPGRNIDSERPRGYHHPQGFLEDDDSPVCY | 1891 |
| | \|\|\|\|\|\|\|\|\|\|\|\|\|\|\|\|\|\|\|\|\|\|\|\|\|\|\|\|\|\|\|\|\|\|\|\|\|\|\|\|\|\|\|\|\|\|\|\|\|\| | |
| 1851 | CYEDDSSPTWSRQNYGYYSRYPGRNIDSERPRGYHHPQGFLEDDDSPVCY | 1900 |
| | . . . . . | |
| 1892 | DSRRSPRRRLLPPTPASHRRSSFNFECLRRQSSQEEVPSSPIFPHRTALP | 1941 |
| | \|\|\|\|\|\|\|\|\|\|\|\|\|\|\|\|\|\|\|\|\|\|\|\|\|\|\|\|\|\|\|\|\|\|\|\|\|\|\|\|\|\|\|\|\|\|\|\|\|\| | |
| 1901 | DSRRSPRRRLLPPTPASHRRSSFNFECLRRQSSQEEVPSSPIFPHRTALP | 1950 |
| | . . . . . | |
| 1942 | LHLMQQQIMAVAGLDSSKAQKYSPSHSTRSWATPPATPPYRDWTPCYTPL | 1991 |
| | \|\|\|\|\|\|\|\|\|\|\|\|\|\|\|\|\|\|\|\|\|\|\|\|\|\|\|\|\|\|\|\|\|\|\|\|\|\|\|\|\|\|\|\|\|\|\|\|\|\| | |
| 1951 | LHLMQQQIMAVAGLDSSKAQKYSPSHSTRSWATPPATPPYRDWTPCYTPL | 2000 |
| | . . . . . | |
| 1992 | IQVEQSEALDQVNGSLPSLHRSSWYTDEPDISYRTFTPASLTVPSSFRNK | 2041 |
| | \|\|\|\|\|\|\|\|\|\|\|\|\|\|\|\|\|\|\|\|\|\|\|\|\|\|\|\|\|\|\|\|\|\|\|\|\|\|\|\|\|\|\|\|\|\|\|\|\|\| | |
| 2001 | IQVEQSEALDQVNGSLPSLHRSSWYTDEPDISYRTFTPASLTVPSSFRNK | 2050 |
| | . . . . . | |
| 2042 | NSDKQRSADSLVEAVLISEGLGRYARDPKFVSATKHEIADACDLTIDEME | 2091 |
| | \|\|\|\|\|\|\|\|\|\|\|\|\|\|\|\|\|\|\|\|\|\|\|\|\|\|\|\|\|\|\|\|\|\|\|\|\|\|\|\|\|\|\|\|\|\|\|\|\|\| | |
| 2051 | NSDKQRSADSLVEAVLISEGLGRYARDPKFVSATKHEIADACDLTIDEME | 2100 |
| | . . . . . | |
| 2092 | SAASTLLNGNVRPRANGDVGPLSHRQDYELQDFGPGYSDEEPDPGRDEED | 2141 |
| | \|\|\|\|\|\|\|\|\|\|\|\|\|\|\|\|\|\|\|\|\|\|\|\|\|\|\|\|\|\|\|\|\|\|\|\|\|\|\|\|\|\|\|\|\|\|\|\|\|\| | |
| 2101 | SAASTLLNGNVRPRANGDVGPLSHRQDYELQDFGPGYSDEEPDPGRDEED | 2150 |
| | . | |
| 2142 | LADEMICITTL | 2152 |
| | \|\|\|\|\|\|\|\|\|\|\| | |
| 2151 | LADEMICITTL | 2161 |

### EXAMPLE 23

[0442] The calcium channel alpha subunit splice variants according to the present invention are expected to have diagnostic and/or therapeutic utility. With regard to therapeutic utility, these variants are preferably targets for a drug or drugs, which may optionally be a small molecule for example.

[0443] A “variant-treatable” disease refers to any disease that is treatable through targeting a splice variant of any of the calcium channel alpha 1 subunits according to the present invention, and/or by targeting a calcium channel having such an alpha 1 subunit splice variant. “Treatment” also encompasses prevention, amelioration, elimination and control of the disease and/or pathological condition. The diseases for which such variants may be useful targets depends upon the functionality of the known protein (for example, cardiac vs. neuronal, T-type vs. L-type and so forth). The variants themselves are described by “cluster” or by gene, as these variants are splice variants of known proteins. Therefore, a “cluster-related disease” or a “protein-related disease” refers to a disease that may be treated by a particular protein, with regard to the description of such diseases below a therapeutic protein variant according to the present invention.

[0444] The term “biologically active”, as used herein, refers to a protein being suitable as a target for a drug or drugs. Likewise, “immunologically active” refers to the capability of the natural, recombinant, or synthetic ligand, or any oligopeptide thereof, to induce a specific immune response in appropriate animals or cells and to bind with specific antibodies.

[0445] The term “modulate”, as used herein, refers to a change in the activity of at least one calcium channel activity. For example, modulation may cause an increase or a decrease in protein activity, binding characteristics, or any other biological, functional or immunological properties of a calcium channel.

[0446] Methods of Treatment

[0447] As mentioned hereinabove the novel therapeutic protein variants of the present invention can be used as targets for drug or drugs to treat cluster or protein-related diseases, disorders or conditions.

[0448] Thus, according to an additional aspect of the present invention there is provided a method of treating cluster or protein-related disease, disorder or condition in a subject.

[0449] The subject according to the present invention is a mammal, preferably a human which is diagnosed with one of the disease, disorder or conditions described hereinabove, or alternatively is predisposed to at least one type of the cluster or protein-related disease, disorder or conditions described hereinabove.

[0450] As used herein the term “treating” refers to preventing, curing, reversing, attenuating, alleviating, minimizing, suppressing or halting the deleterious effects of the above-described diseases, disorders or conditions.

[0451] Treating, according to the present invention, can be effected by specifically upregulating or alternatively downregulating the expression of at least one of the polypeptides of the present invention in the subject.

[0452] Optionally, upregulation may be effected by administering to the subject at least one of the polypeptides of the present invention (e.g., recombinant or synthetic) or an active portion thereof, as described herein. However, since the bioavailability of large polypeptides may potentially be relatively small due to high degradation rate and low penetration rate, administration of polypeptides is preferably confined to small peptide fragments (e.g., about 100 amino acids). The polypeptide or peptide may optionally be administered in as part of a pharmaceutical composition, described in more detail below.

[0453] It will be appreciated that treatment of the above-described diseases according to the present invention may be combined with other treatment methods known in the art (i.e., combination therapy). Thus, treatment of malignancies using the agents of the present invention may be combined with, for example, radiation therapy, antibody therapy and/or chemotherapy.

[0454] Alternatively or additionally, an upregulating method may optionally be effected by specifically upregulating the amount (optionally expression) in the subject of at least one of the polypeptides of the present invention or active portions thereof.

[0455] As is mentioned hereinabove and in the Examples section which follows, the biomolecular sequences of this aspect of the present invention may be used as valuable therapeutic tools in the treatment of diseases, disorders or conditions in which altered activity or expression of the wild-type (known) gene product is known to contribute to disease, disorder or condition onset or progression.

[0456] It will be appreciated that the polypeptides of the present invention may also have agonistic properties as targets, such that increasing their rate or level of function may be desired. As such, the biomolecular sequences of this aspect of the present invention may be used to treat conditions or diseases in which the wild-type gene product plays a favorable role, for example, increasing angiogenesis in cases of diabetes or ischemia.

[0457] Upregulating expression of the therapeutic protein or polypeptide variants of the present invention may be effected via the administration of at least one of the exogenous polynucleotide sequences of the present invention, ligated into a nucleic acid expression construct (as described in greater detail hereinabove) designed for expression of coding sequences in eukaryotic cells (e.g., mammalian cells), as described above. Accordingly, the exogenous polynucleotide sequence may be a DNA or RNA sequence encoding the variants of the present invention or active portions thereof.

[0458] It will be appreciated that the nucleic acid construct can be administered to the individual employing any suitable mode of administration including in vivo gene therapy (e.g., using viral transformation as described hereinabove). Alternatively, the nucleic acid construct is introduced into a suitable cell via an appropriate gene delivery vehicle/method (transfection, transduction, homologous recombination, etc.) and an expression system as needed and then the modified cells are expanded in culture and returned to the individual (i.e., ex-vivo gene therapy).

[0459] Such cells (i.e., which are transfected with the nucleic acid construct of the present invention) can be any suitable cells, such as kidney, bone marrow, keratinocyte, lymphocyte, adult stem cells, cord blood cells, embryonic stem cells which are derived from the individual and are transfected ex vivo with an expression vector containing the polynucleotide designed to express the polypeptide of the present inevntion as described hereinabove.

[0460] Administration of the ex vivo transfected cells of the present invention can be effected using any suitable route such as intravenous, intra peritoneal, intra kidney, intra gastrointestinal track, subcutaneous, transcutaneous, intramuscular, intracutaneous, intrathecal, epidural and rectal. According to presently preferred embodiments, the ex vivo transfected cells of the present invention are introduced to the individual using intravenous, intra kidney, intra gastrointestinal track and/or intra peritoneal administrations.

[0461] The ex vivo transfected cells of the present invention can be derived from either autologous sources such as self bone marrow cells or from allogeneic sources such as bone marrow or other cells derived from non-autologous sources. Since non-autologous cells are likely to induce an immune reaction when administered to the body several approaches have been developed to reduce the likelihood of rejection of non-autologous cells. These include either suppressing the recipient immune system or encapsulating the non-autologous cells or tissues in immunoisolating, semipermeable membranes before transplantation.

[0462] Encapsulation techniques are generally classified as microencapsulation, involving small spherical vehicles and macroencapsulation, involving larger flat-sheet and hollow-fiber membranes (Uludag, H. et al. Technology of mammalian cell encapsulation. Adv Drug Deliv Rev. 2000; 42: 29-64).

[0463] Methods of preparing microcapsules are known in the arts and include for example those disclosed by Lu M Z, et al., Cell encapsulation with alginate and alpha-phenoxycinnamnylideneacetylated poly(allylamine). Biotechnol Bioeng. 2000, 70: 479-83, Chang T M and Prakash S. Procedures for microencapsulation of enzymes, cells and genetically engineered microorganisms. Mol Biotechnol. 2001, 17: 249-60, and Lu M Z, et al., A novel cell encapsulation method using photosensitive poly(allylamine alpha-cyanocinnamylideneacetate). J Microencapsul. 2000, 17: 245-51.

[0464] For example, microcapsules are prepared by complexing modified collagen with a ter-polymer shell of 2-hydroxyethyl methylacrylate (HEMA), methacrylic acid (MAA) and methyl methacrylate (MMA), resulting in a capsule thickness of 2-5 μm. Such microcapsules can be further encapsulated with additional 2-5 μm ter-polymer shells in order to impart a negatively charged smooth surface and to minimize plasma protein absorption (Chia, S. M. et al. Multi-layered microcapsules for cell encapsulation Biomaterials. 2002 23: 849-56).

[0465] Other microcapsules are based on alginate, a marine polysaccharide (Sambanis, A. Encapsulated islets in diabetes treatment. Diabetes Thechnol. Ther. 2003, 5: 665-8) or its derivatives. For example, microcapsules can be prepared by the polyelectrolyte complexation between the polyanions sodium alginate and sodium cellulose sulphate with the polycation poly(methylene-co-guanidine) hydrochloride in the presence of calcium chloride.

[0466] It will be appreciated that cell encapsulation is improved when smaller capsules are used. Thus, the quality control, mechanical stability, diffusion properties, and in vitro activities of encapsulated cells improved when the capsule size was reduced from 1 mm to 400 μm (Canaple L. et al., Improving cell encapsulation through size control. J Biomater Sci Polym Ed. 2002; 13: 783-96). Moreover, nanoporous biocapsules with well-controlled pore size as small as 7 nm, tailored surface chemistries and precise microarchitectures were found to successfully immunoisolate microenvironments for cells (Williams D. Small is beautiful: microparticle and nanoparticle technology in medical devices. Med Device Technol. 1999, 10: 6-9; Desai, T. A. Microfabrication technology for pancreatic cell encapsulation. Expert Opin Biol Ther. 2002, 2: 633-46).

[0467] It will be appreciated that the present methodology may also be effected by specifically upregulating the expression of the variants of the present invention endogenously in the subject. Agents for upregulating endogenous expression of specific splice variants of a given gene include antisense oligonucleotides, which are directed at splice sites of interest, thereby altering the splicing pattern of the gene. This approach has been successfully used for shifting the balance of expression of the two isoforms of Bcl-x [Taylor (1999) Nat. Biotechnol. 17:1097-1100; and Mercatante (2001) J. Biol. Chem. 276:16411-16417]; IL-5R [Karras (2000) Mol. Pharmacol. 58:380-387]; and c-myc [Giles (1999) Antisense Acid Drug Dev. 9:213-220].

[0468] For example, interleukin 5 and its receptor play a critical role as regulators of hematopoiesis and as mediators in some inflammatory diseases such as allergy and asthma. Two alternatively spliced isoforms are generated from the IL-5R gene, which include (i.e., long form) or exclude (i.e., short form) exon 9. The long form encodes for the intact membrane-bound receptor, while the shorter form encodes for a secreted soluble non-functional receptor. Using 2′-O-MOE-oligonucleotides specific to regions of exon 9, Karras and co-workers (supra) were able to significantly decrease the expression of the wild type receptor and increase the expression of the shorter isoforms. Design and synthesis of oligonucleotides which can be used according to the present invention are described hereinbelow and by Sazani and Kole (2003) Progress in Moleclular and Subcellular Biology 31:217-239.

[0469] Treatment can preferably effected by agents which are capable of specifically downregulating expression (or activity) of at least one of the polypeptide variants of the present invention.

[0470] Down regulating the expression of the therapeutic protein variants of the present invention may be achieved using oligonucleotide agents such as those described in greater detail below.

[0471] SiRNA molecules—Small interfering RNA (siRNA) molecules can be used to down-regulate expression of the therapeutic protein variants of the present invention. RNA interference is a two-step process. The first step, which is termed as the initiation step, input dsRNA is digested into 21-23 nucleotide (nt) small interfering RNAs (siRNA), probably by the action of Dicer, a member of the RNase III family of dsRNA-specific ribonucleases, which processes (cleaves) dsRNA (introduced directly or via a transgene or a virus) in an ATP-dependent manner. Successive cleavage events degrade the RNA to 19-21 bp duplexes (siRNA), each with 2-nucleotide 3′ overhangs [Hutvagner and Zamore Curr. Opin. Genetics and Development 12:225-232 (2002); and Bernstein Nature 409:363-366 (2001)].

[0472] In the effector step, the siRNA duplexes bind to a nuclease complex to from the RNA-induced silencing complex (RISC). An ATP-dependent unwinding of the siRNA duplex is required for activation of the RISC. The active RISC then targets the homologous transcript by base pairing interactions and cleaves the mRNA into 12 nucleotide fragments from the 3′ terminus of the siRNA [Hutvagner and Zamore Curr. Opin. Genetics and Development 12:225-232 (2002); Hammond et al. (2001) Nat. Rev. Gen. 2:110-119 (2001); and Sharp Genes. Dev. 15:485-90 (2001)]. Although the mechanism of cleavage is still to be elucidated, research indicates that each RISC contains a single siRNA and an RNase [Hutvagner and Zamore Curr. Opin. Genetics and Development 12:225-232 (2002)].

[0473] Because of the remarkable potency of RNAi, an amplification step within the RNAi pathway has been suggested. Amplification could occur by copying of the input dsRNAs which would generate more siRNAs, or by replication of the siRNAs formed. Alternatively or additionally, amplification could be effected by multiple turnover events of the RISC [Hammond et al. Nat. Rev. Gen. 2:110-119 (2001), Sharp Genes. Dev. 15:485-90 (2001); Hutvagner and Zamore Curr. Opin. Genetics and Development 12:225-232 (2002)]. For more information on RNAi see the following reviews Tuschl ChemBiochem. 2:239-245 (2001); Cullen Nat. Immunol. 3:597-599 (2002); and Brantl Biochem. Biophys. Act. 1575:15-25 (2002).

[0474] Synthesis of RNAi molecules suitable for use with the present invention can be effected as follows. First, the mRNA sequence is scanned downstream of the AUG start codon for AA dinucleotide sequences. Occurrence of each AA and the 3′ adjacent 19 nucleotides is recorded as potential siRNA target sites. Preferably, siRNA target sites are selected from the open reading frame, as untranslated regions (UTRs) are richer in regulatory protein binding sites. UTR-binding proteins and/or translation initiation complexes may interfere with binding of the siRNA endonuclease complex [Tuschl ChemBiochem. 2:239-245]. It will be appreciated though, that siRNAs directed at untranslated regions may also be effective, as demonstrated for GAPDH wherein siRNA directed at the 5′ UTR mediated about 90% decrease in cellular GAPDH mRNA and completely abolished protein level (www.ambion.com/techlib/tn/91/912.html).

[0475] Second, potential target sites are compared to an appropriate genomic database (e.g., human, mouse, rat etc.) using any sequence alignment software, such as the BLAST software available from the NCBI server (www.ncbi.nlm.nih.gov/BLAST/). Putative target sites which exhibit significant homology to other coding sequences are filtered out.

[0476] Qualifying target sequences are selected as template for siRNA synthesis. Preferred sequences are those including low G/C content as these have proven to be more effective in mediating gene silencing as compared to those with G/C content higher than 55%. Several target sites are preferably selected along the length of the target gene for evaluation. Target sites are selected from the unique nucleotide sequences of each of the polynucleotides of the present invention, such that each polynucleotide is specifically down regulated. For better evaluation of the selected siRNAs, a negative control is preferably used in conjunction. Negative control siRNA preferably include the same nucleotide composition as the siRNAs but lack significant homology to the genome. Thus, a scrambled nucleotide sequence of the siRNA is preferably used, provided it does not display any significant homology to any other gene.

[0477] DNAzyme molecules—Another agent capable of downregulating expression of the polypeptides of the present invention is a DNAzyme molecule capable of specifically cleaving an mRNA transcript or DNA sequence of the polynucleotides of the present invention. DNAzymes are single-stranded polynucleotides which are capable of cleaving both single and double stranded target sequences (Breaker, R. R. and Joyce, G. Chemistry and Biology 1995; 2:655; Santoro, S. W. & Joyce, G. F. Proc. Natl, Acad. Sci. USA 1997; 943:4262) A general model (the “10-23” model) for the DNAzyme has been proposed. “10-23” DNAzymes have a catalytic domain of 15 deoxyribonucleotides, flanked by two substrate-recognition domains of seven to nine deoxyribonucleotides each. This type of DNAzyme can effectively cleave its substrate RNA at purine:pyrimidine junctions (Santoro, S. W. & Joyce, G. F. Proc. Natl, Acad. Sci. USA 199; for rev of DNAzymes see Khachigian, L M [Curr Opin Mol Ther 4:119-21 (2002)].

[0478] Target sites for DNAzymes are selected from the unique nucleotide sequences of each of the polynucleotides of the present invention, such that each polynucleotide is specifically down regulated.

[0479] Examples of construction and amplification of synthetic, engineered DNAzymes recognizing single and double-stranded target cleavage sites have been disclosed in U.S. Pat. No. 6,326,174 to Joyce et al. DNAzymes of similar design directed against the human Urokinase receptor were recently observed to inhibit Urokinase receptor expression, and successfully inhibit colon cancer cell metastasis in vivo (Itoh et al, 20002, Abstract 409, Ann Meeting Am Soc Gen Ther www.asgt.org). In another application, DNAzymes complementary to bcr-ab1 oncogenes were successful in inhibiting the oncogenes expression in leukemia cells, and lessening relapse rates in autologous bone marrow transplant in cases of CML and ALL.

[0480] Antisense molecules—Downregulation of the polynucleotides of the present invention can also be effected by using an antisense polynucleotide capable of specifically hybridizing with an mRNA transcript encoding the polypeptide variants of the present invention. The term “antisense”, as used herein, refers to any composition containing nucleotide sequences, which are complementary to a specific DNA or RNA sequence.

[0481] The term “antisense strand” is used in reference to a nucleic acid strand that is complementary to the “sense” strand. Antisense molecules also include peptide nucleic acids and may be produced by any method including synthesis or transcription. Once introduced into a cell, the complementary nucleotides combine with natural sequences produced by the cell to form duplexes and block either transcription or translation. The designation “negative” is sometimes used in reference to the antisense strand, and “positive” is sometimes used in reference to the sense strand. Antisense oligonucleotides are also used for modulation of alternative splicing in vivo and for diagnostics in vivo and in vitro (Khelifi C. et al., 2002, Current Pharmaceutical Design 8:451-1466; Sazani, P., and Kole. R. Progress in Molecular and Cellular Biology, 2003, 31:217-239).

[0482] Design of antisense molecules which can be used to efficiently downregulate expression of the polypeptides of the present invention must be effected while considering two aspects important to the antisense approach. The first aspect is delivery of the oligonucleotide into the cytoplasm of the appropriate cells, while the second aspect is design of an oligonucleotide which specifically binds the designated mRNA within cells in a way which inhibits translation thereof.

[0483] The prior art teaches of a number of delivery strategies which can be used to efficiently deliver oligonucleotides into a wide variety of cell types [see, for example, Luft J Mol Med 76: 75-6 (1998); Kronenwett et al. Blood 91: 852-62 (1998); Rajur et al. Bioconjug Chem 8: 935-40 (1997); Lavigne et al. Biochem Biophys Res Commun 237: 566-71 (1997) and Aoki et al. (1997) Biochem Biophys Res Commun 231: 540-5 (1997)].

[0484] In addition, algorithms for identifying those sequences with the highest predicted binding affinity for their target mRNA based on a thermodynamic cycle that accounts for the energetics of structural alterations in both the target mRNA and the oligonucleotide are also available [see, for example, Walton et al. Biotechnol Bioeng 65: 1-9 (1999)].

[0485] Such algorithms have been successfully used to implement an antisense approach in cells. For example, the algorithm developed by Walton et al. enabled scientists to successfully design antisense oligonucleotides for rabbit beta-globin (RBG) and mouse tumor necrosis factor-alpha (TNF alpha) transcripts. The same research group has more recently reported that the antisense activity of rationally selected oligonucleotides against three model target mRNAs (human lactate dehydrogenase A and B and rat gp130) in cell culture as evaluated by a kinetic PCR technique proved effective in almost all cases, including tests against three different targets in two cell types with phosphodiester and phosphorothioate oligonucleotide chemistries.

[0486] In addition, several approaches for designing and predicting efficiency of specific oligonucleotides using an in vitro system were also published (Matveeva et al., Nature Biotechnology 16: 1374-1375 (1998)].

[0487] Several clinical trials have demonstrated safety, feasibility and activity of antisense oligonucleotides. For example, antisense oligonucleotides suitable for the treatment of cancer have been successfully used [Holmund et al., Curr Opin Mol Ther 1:372-85 (1999)], while treatment of hematological malignancies via antisense oligonucleotides targeting c-myb gene, p53 and Bcl-2 had entered clinical trials and had been shown to be tolerated by patients [Gerwitz Curr Opin Mol Ther 1:297-306 (1999)].

[0488] More recently, antisense-mediated suppression of human heparanase gene expression has been reported to inhibit pleural dissemination of human cancer cells in a mouse model [Uno et al., Cancer Res 61:7855-60 (2001)].

[0489] Thus, the current consensus is that recent developments in the field of antisense technology which, as described above, have led to the generation of highly accurate antisense design algorithms and a wide variety of oligonucleotide delivery systems, enable an ordinarily skilled artisan to design and implement antisense approaches suitable for down-regulating expression of known sequences without having to resort to undue trial and error experimentation.

[0490] Target sites for antisense molecules are selected from the unique nucleotide sequences of each of the polynucleotides of the present invention, such that each polynucleotide is specifically down regulated.

[0491] Ribozymes—Another agent capable of downregulating expression of the polypeptides of the present invention is a ribozyme molecule capable of specifically cleaving an mRNA transcript encoding the polypeptide variants of the present invention. Ribozymes are being increasingly used for the sequence-specific inhibition of gene expression by the cleavage of mRNAs encoding proteins of interest [Welch et al., Curr Opin Biotechnol. 9:486-96 (1998)]. The possibility of designing ribozymes to cleave any specific target RNA has rendered them valuable tools in both basic research and therapeutic applications. In therapeutics area, ribozymes have been exploited to target viral RNAs in infectious diseases, dominant oncogenes in cancers and specific somatic mutations in genetic disorders [Welch et al., Clin Diagn Virol. 10:163-71 (1998)]. Most notably, several ribozyme gene therapy protocols for HIV patients are already in Phase 1 trials. More recently, ribozymes have been used for transgenic animal research, gene target validation and pathway elucidation. Several ribozymes are in various stages of clinical trials. ANGIOZYME was the first chemically synthesized ribozyme to be studied in human clinical trials. ANGIOZYME specifically inhibits formation of the VEGF-r (Vascular Endothelial Growth Factor receptor), a key component in the angiogenesis pathway. Ribozyme Pharmaceuticals, Inc., as well as other firms have demonstrated the importance of anti-angiogenesis therapeutics in animal models. HEPTAZYME, a ribozyme designed to selectively destroy Hepatitis C Virus (HCV) RNA, was found effective in decreasing Hepatitis C viral RNA in cell culture assays (Ribozyme Pharmaceuticals, Incorporated—WEB home page).

[0492] An additional method of regulating the expression of a spcific gene in cells is via triplex forming oligonuclotides (TFOs). Recent studies have shown that TFOs can be designed which can recognize and bind to polypurine/polypirimidine regions in double-stranded helical DNA in a sequence-specific manner. These recognition rules are outlined by Maher III, L. J., et al., Science, 1989; 245:725-730; Moser, H. E., et al., Science, 1987; 238:645-630; Beal, P. A., et al, Science, 1992; 251:1360-1363; Cooney, M., et al., Science, 1988; 241:456-459; and Hogan, M. E., et al., EP Publication 375408. Modification of the oligonuclotides, such as the introduction of intercalators and backbone substitutions, and optimization of binding conditions (pH and cation concentration) have aided in overcoming inherent obstacles to TFO activity such as charge repulsion and instability, and it was recently shown that synthetic oligonucleotides can be targeted to specific sequences (for a recent review see Seidman and Glazer, J Clin Invest 2003; 112:487-94).

[0493] In general, the triplex-forming oligonucleotide has the sequence correspondence:

| | |
|---|---|
| oligo | 3′--A G G T |
| duplex | 5′--A G C T |
| duplex | 3′--T C G A |

[0494] However, it has been shown that the A-AT and G-GC triplets have the greatest triple helical stability (Reither and Jeltsch, BMC Biochem, 2002, Sep. 12, Epub). The same authors have demonstrated that TFOs designed according to the A-AT and G-GC rule do not form non-specific triplexes, indicating that the triplex formation is indeed sequence specific.

[0495] Thus for any given sequence in the gene regulatory region a triplex forming sequence may be devised. Triplex-forming oligonucleotides preferably are at least 15, more preferably 25, still more preferably 30 or more nucleotides in length, up to 50 or 100 bp.

[0496] Transfection of cells (for example, via cationic liposomes) with TFOs, and formation of the triple helical structure with the target DNA induces steric and functional changes, blocking transcription initiation and elongation, allowing the introduction of desired sequence changes in the endogenous DNA and resulting in the specific downregulation of gene expression. Examples of such suppression of gene expression in cells treated with TFOs include knockout of episomal supFG1 and endogenous HPRT genes in mammalian cells (Vasquez et al., Nucl Acids Res. 1999; 27:1176-81, and Puri, et al, J Biol Chem, 2001; 276:28991-98), and the sequence- and target specific downregulation of expression of the Ets2 transcription factor, important in prostate cancer etiology (Carbone, et al, Nucl Acid Res. 2003; 31:833-43), and the pro-inflammatory ICAM-1 gene (Besch et al, J Biol Chem, 2002; 277:32473-79). In addition, Vuyisich and Beal have recently shown that sequence specific TFOs can bind to dsRNA, inhibiting activity of dsRNA-dependent enzymes such as RNA-dependent kinases (Vuyisich and Beal, Nuc. Acids Res 2000; 28:2369-74).

[0497] Additionally, TFOs designed according to the abovementioned principles can induce directed mutagenesis capable of effecting DNA repair, thus providing both downregulation and upregulation of expression of endogenous genes (Seidman and Glazer, J Clin Invest 2003; 12:487-94). Detailed description of the design, synthesis and administration of effective TFOs can be found in U.S. Patent Application Nos. 2003 017068 and 2003 0096980 to Froehler et al, and 2002 0128218 and 2002 0123476 to Emanuele et al, and U.S. Pat. No. 5,721,138 to Lawn.

[0498] Alternatively, down regulation of the polypeptide variants of the present invention may be achieved at the polypeptide level using downregulating agents such as antibodies or antibody fragments capabale of specifically binding the polypeptides of the present invention and inhibiting the activity thereof (i.e., neutralizing antibodies). Such antibodies can be directed for example, to the heterodimerizing domain on the variant, or to a putative ligand binding domain. Further description of antibodies and methods of generating same is provided below.

[0499] Alternatively, down regulation of the polypeptide variants of the present invention may be achieved using small, unique peptide sequences (e.g., of about 50-100 amino acids) which are capable of specifically binding to their target molecules (e.g., a receptor subunit) and thus prevent endogenous subunit assembly or association and therefore antagonize the receptor activity. Such peptides can be natural or synthetic peptides which are derived from the polypeptide of the present invention.

[0500] Pharmaceutical Compositions and Delivery Thereof

[0501] The present invention features a pharmaceutical composition comprising a therapeutically effective amount of a therapeutic agent according to the present invention, which preferably binds to and/or affects a calcium channel splice variant as described herein. Optionally and alternatively, the therapeutic agent could be an antibody or an oligonucleotide that specifically recognizes and binds to the therapeutic protein variant, but not to the corresponding known protein.

[0502] The pharmaceutical composition according to the present invention is preferably used for the treatment of cluster or protein-related disease, disorder or condition.

[0503] “Treatment” refers to both therapeutic treatment and prophylactic or preventative measures. Those in need of treatment include those already with the disorder as well as those in which the disorder is to be prevented. Hence, the mammal to be treated herein may have been diagnosed as having the disorder or may be predisposed or susceptible to the disorder. “Mammal” for purposes of treatment refers to any animal classified as a mammal, including humans, domestic and farm animals, and zoo, sports, or pet animals, such as dogs, horses, cats, cows, etc. Preferably, the mammal is human.

[0504] A “disorder” is any condition that would benefit from treatment with the agent according to the present invention. This includes chronic and acute disorders or diseases including those pathological conditions which predispose the mammal to the disorder in question. Non-limiting examples of disorders to be treated herein are described with regard to specific examples given herein.

[0505] The term “therapeutically effective amount” refers to an amount of agent according to the present invention that is effective to treat a disease or disorder in a mammal. In the case of cancer, the therapeutically effective amount of the agent may reduce the number of cancer cells; reduce the tumor size; inhibit (i.e., slow to some extent and preferably stop) cancer cell infiltration into peripheral organs; inhibit (i.e., slow to some extent and preferably stop) tumor metastasis; inhibit, to some extent, tumor growth; and/or relieve to some extent one or more of the symptoms associated with the cancer. To the extent the agent may prevent growth and/or kill existing cancer cells, it may be cytostatic and/or cytotoxic. For cancer therapy, efficacy can, for example, be measured by assessing the time to disease progression (TTP) and/or determining the response rate (RR).

[0506] The therapeutic agents of the present invention can be provided to the subject per se, or as part of a pharmaceutical composition where they are mixed with a pharmaceutically acceptable carrier.

[0507] As used herein a “pharmaceutical composition” refers to a preparation of one or more of the active ingredients described herein with other chemical components such as physiologically suitable carriers and excipients. The purpose of a pharmaceutical composition is to facilitate administration of a compound to an organism.

[0508] Herein the term “active ingredient” refers to the preparation accountable for the biological effect.

[0509] Hereinafter, the phrases “physiologically acceptable carrier” and “pharmaceutically acceptable carrier” which may be interchangeably used refer to a carrier or a diluent that does not cause significant irritation to an organism and does not abrogate the biological activity and properties of the administered compound. An adjuvant is included under these phrases. One of the ingredients included in the pharmaceutically acceptable carrier can be for example polyethylene glycol (PEG), a biocompatible polymer with a wide range of solubility in both organic and aqueous media (Mutter et al. (1979).

[0510] Herein the term “excipient” refers to an inert substance added to a pharmaceutical composition to further facilitate administration of an active ingredient. Examples, without limitation, of excipients include calcium carbonate, calcium phosphate, various sugars and types of starch, cellulose derivatives, gelatin, vegetable oils and polyethylene glycols.

[0511] Techniques for formulation and administration of drugs may be found in “Remington's Pharmaceutical Sciences,” Mack Publishing Co., Easton, Pa., latest edition, which is incorporated herein by reference.

[0512] Suitable routes of administration may, for example, include oral, rectal, transmucosal, especially transnasal, intestinal or parenteral delivery, including intramuscular, subcutaneous and intramedullary injections as well as intrathecal, direct intraventricular, intravenous, intraperitoneal, intranasal, or intraocular injections. Alternately, one may administer a preparation in a local rather than systemic manner, for example, via injection of the preparation directly into a specific region of a patient's body.

[0513] Pharmaceutical compositions of the present invention may be manufactured by processes well known in the art, e.g., by means of conventional mixing, dissolving, granulating, dragee-making, levigating, emulsifying, encapsulating, entrapping or lyophilizing processes.

[0514] Pharmaceutical compositions for use in accordance with the present invention may be formulated in conventional manner using one or more physiologically acceptable carriers comprising excipients and auxiliaries, which facilitate processing of the active ingredients into preparations which, can be used pharmaceutically. Proper formulation is dependent upon the route of administration chosen.

[0515] For injection, the active ingredients of the invention may be formulated in aqueous solutions, preferably in physiologically compatible buffers such as Hank's solution, Ringer's solution, or physiological salt buffer. For transmucosal administration, penetrants appropriate to the barrier to be permeated are used in the formulation. Such penetrants are generally known in the art.

[0516] For oral administration, the compounds can be formulated readily by combining the active compounds with pharmaceutically acceptable carriers well known in the art. Such carriers enable the compounds of the invention to be formulated as tablets, pills, dragees, capsules, liquids, gels, syrups, slurries, suspensions, and the like, for oral ingestion by a patient. Pharmacological preparations for oral use can be made using a solid excipient, optionally grinding the resulting mixture, and processing the mixture of granules, after adding suitable auxiliaries if desired, to obtain tablets or dragee cores. Suitable excipients are, in particular, fillers such as sugars, including lactose, sucrose, mannitol, or sorbitol; cellulose preparations such as, for example, maize starch, wheat starch, rice starch, potato starch, gelatin, gum tragacanth, methyl cellulose, hydroxypropylmethyl-cellulose, sodium carbomethylcellulose; and/or physiologically acceptable polymers such as polyvinylpyrrolidone (PVP). If desired, disintegrating agents may be added, such as cross-linked polyvinyl pyrrolidone, agar, or alginic acid or a salt thereof such as sodium alginate.

[0517] Dragee cores are provided with suitable coatings. For this purpose, concentrated sugar solutions may be used which may optionally contain gum arabic, talc, polyvinyl pyrrolidone, carbopol gel, polyethylene glycol, titanium dioxide, lacquer solutions and suitable organic solvents or solvent mixtures. Dyestuffs or pigments may be added to the tablets or dragee coatings for identification or to characterize different combinations of active compound doses.

[0518] Pharmaceutical compositions, which can be used orally, include push-fit capsules made of gelatin as well as soft, sealed capsules made of gelatin and a plasticizer, such as glycerol or sorbitol. The push-fit capsules may contain the active ingredients in admixture with filler such as lactose, binders such as starches, lubricants such as talc or magnesium stearate and, optionally, stabilizers. In soft capsules, the active ingredients may be dissolved or suspended in suitable liquids, such as fatty oils, liquid paraffin, or liquid polyethylene glycols. In addition, stabilizers may be added. All formulations for oral administration should be in dosages suitable for the chosen route of administration.

[0519] For buccal administration, the compositions may take the form of tablets or lozenges formulated in conventional manner.

[0520] For administration by nasal inhalation, the active ingredients for use according to the present invention are conveniently delivered in the form of an aerosol spray presentation from a pressurized pack or a nebulizer with the use of a suitable propellant, e.g., dichlorodifluoromethane, trichlorofluoromethane, dichloro-tetrafluoroethane or carbon dioxide. In the case of a pressurized aerosol, the dosage unit may be determined by providing a valve to deliver a metered amount. Capsules and cartridges of, e.g., gelatin for use in a dispenser may be formulated containing a powder mix of the compound and a suitable powder base such as lactose or starch.

[0521] The preparations described herein may be formulated for parenteral administration, e.g., by bolus injection or continuous infusion. Formulations for injection may be presented in unit dosage form, e.g., in ampoules or in multidose containers with optionally, an added preservative. The compositions may be suspensions, solutions or emulsions in oily or aqueous vehicles, and may contain formulatory agents such as suspending, stabilizing and/or dispersing agents.

[0522] Pharmaceutical compositions for parenteral administration include aqueous solutions of the active preparation in water-soluble form. Additionally, suspensions of the active ingredients may be prepared as appropriate oily or water based injection suspensions. Suitable lipophilic solvents or vehicles include fatty oils such as sesame oil, or synthetic fatty acids esters such as ethyl oleate, triglycerides or liposomes. Aqueous injection suspensions may contain substances, which increase the viscosity of the suspension, such as sodium carboxymethyl cellulose, sorbitol or dextran. Optionally, the suspension may also contain suitable stabilizers or agents which increase the solubility of the active ingredients to allow for the preparation of highly concentrated solutions.

[0523] Alternatively, the active ingredient may be in powder form for constitution with a suitable vehicle, e.g., sterile, pyrogen-free water based solution, before use.

[0524] The preparation of the present invention may also be formulated in rectal compositions such as suppositories or retention enemas, using, e.g., conventional suppository bases such as cocoa butter or other glycerides.

[0525] Pharmaceutical compositions suitable for use in context of the present invention include compositions wherein the active ingredients are contained in an amount effective to achieve the intended purpose. More specifically, a therapeutically effective amount means an amount of active ingredients effective to prevent, alleviate or ameliorate symptoms of disease or prolong the survival of the subject being treated.

Determination of a therapeutically effective amount is well within the capability of those skilled in the art.

[0526] For any preparation used in the methods of the invention, the therapeutically effective amount or dose can be estimated initially from in vitro assays. For example, a dose can be formulated in animal models and such information can be used to more accurately determine useful doses in humans.

[0527] Toxicity and therapeutic efficacy of the active ingredients described herein can be determined by standard pharmaceutical procedures in vitro, in cell cultures or experimental animals. The data obtained from these in vitro and cell culture assays and animal studies can be used in formulating a range of dosage for use in human. The dosage may vary depending upon the dosage form employed and the route of administration utilized. The exact formulation, route of administration and dosage can be chosen by the individual physician in view of the patient's condition. (See e.g., Fingl, et al., 1975, in “The Pharmacological Basis of Therapeutics”, Ch. 1 p. 1).

[0528] Depending on the severity and responsiveness of the condition to be treated, dosing can be of a single or a plurality of administrations, with course of treatment lasting from several days to several weeks or until cure is effected or diminution of the disease state is achieved.

[0529] The amount of a composition to be administered will, of course, be dependent on the subject being treated, the severity of the affliction, the manner of administration, the judgment of the prescribing physician, etc.

Compositions including the preparation of the present invention formulated in a compatible pharmaceutical carrier may also be prepared, placed in an appropriate container, and labeled for treatment of an indicated condition.

[0530] Pharmaceutical compositions of the present invention may, if desired, be presented in a pack or dispenser device, such as an FDA approved kit, which may contain one or more unit dosage forms containing the active ingredient. The pack may, for example, comprise metal or plastic foil, such as a blister pack. The pack or dispenser device may be accompanied by instructions for administration. The pack or dispenser may also be accommodated by a notice associated with the container in a form prescribed by a governmental agency regulating the manufacture, use or sale of pharmaceuticals, which notice is reflective of approval by the agency of the form of the compositions or human or veterinary administration. Such notice, for example, may be of labeling approved by the U.S. Food and Drug Administration for prescription drugs or of an approved product insert.

[0531] Immunogenic Compositions

[0532] A therapeutic agent according to the present invention may optionally be a molecule, which promotes a specific immunogenic response against at least one of the polypeptides of the present invention in the subject. The molecule can be polypeptide variants of the present invention, a fragment derived therefrom or a nucleic acid sequence encoding thereof. Although such a molecule can be provided to the subject per se, the agent is preferably administered with an immunostimulant in an immunogenic composiiton. An immunostimulant may be any substance that enhances or potentiates an immune response (antibody and/or cell-mediated) to an exogenous antigen. Examples of immunostimulants include adjuvants, biodegradable microspheres (e.g., polylactic galactide) and liposomes into which the compound is incorporated (see e.g., U.S. Pat. No. 4,235,877). Vaccine preparation is generally described in, for example, M. F. Powell and M. J. Newman, eds., “Vaccine Design (the subunit and adjuvant approach),” Plenum Press (NY, 1995).

[0533] Illustrative immunogenic compositions may contain DNA encoding one or more of the polypeptides as described above, such that the polypeptide is generated in situ. The DNA may be present within any of a variety of delivery systems known to those of ordinary skill in the art, including nucleic acid expression systems (see below), bacteria and viral expression systems. Numerous gene delivery techniques are well known in the art, such as those described by Rolland, Crit. Rev. Therap. Drug Carrier Systems 15:143-198, 1998, and references cited therein. Appropriate nucleic acid expression systems contain the necessary DNA sequences for expression in the subject (such as a suitable promoter and terminating signal). Bacterial delivery systems involve the administration of a bacterium (such as Bacillus-Calmette-Guerrin) that expresses an immunogenic portion of the polypeptide on its cell surface or secretes such an epitope. In a preferred embodiment, the DNA may be introduced using a viral expression system (e.g., vaccinia or other pox virus, retrovirus, or adenovirus), which may involve the use of a non-pathogenic (defective), replication competent virus. Suitable systems are disclosed, for example, in Fisher-Hoch et al., Proc. Natl. Acad. Sci. USA 86:317-321, 1989; Flexner et al., Ann. N.Y. Acad. Sci. 569:86-103, 1989; Flexner et al., Vaccine 8:17-21, 1990; U.S. Pat. Nos. 4,603,112, 4,769,330, and 5,017,487; WO 89/01973; U.S. Pat. No. 4,777,127; GB 2,200,651; EP 0,345,242; WO 91/02805; Berkner, Biotechniques 6:616-627, 1988; Rosenfeld et al., Science 252:431-434, 1991; Kolls et al., Proc. Natl. Acad. Sci. USA 91:215-219, 1994; Kass-Eisler et al., Proc. Natl. Acad. Sci. USA 90:11498-11502, 1993; Guzman et al., Circulation 88:2838-2848, 1993; and Guzman et al., Cir. Res. 73:1202-1207, 1993. Techniques for incorporating DNA into such expression systems are well known to those of ordinary skill in the art. The DNA may also be “naked,” as described, for example, in Ulmer et al., Science 259:1745-1749, 1993 and reviewed by Cohen, Science 259:1691-1692, 1993. The uptake of naked DNA may be increased by coating the DNA onto biodegradable beads, which are efficiently transported into the cells.

[0534] It will be appreciated that an immunogenic composition may comprise both a polynucleotide and a polypeptide component. Such immunogenic compositions may provide for an enhanced immune response.

[0535] Any of a variety of immunostimulants may be employed in the immunogenic compositions of this invention. For example, an adjuvant may be included. Most adjuvants contain a substance designed to protect the antigen from rapid catabolism, such as aluminum hydroxide or mineral oil, and a stimulator of immune responses, such as lipid A, Bortadella pertussis or Mycobacterium tuberculosis derived proteins. Suitable adjuvants are commercially available as, for example, Freund's Incomplete Adjuvant and Complete Adjuvant (Difco Laboratories, Detroit, Mich.); Merck Adjuvant 65 (Merck and Company, Inc., Rahway, N.J.); AS-2 (SmithKline Beecham, Philadelphia, Pa.); aluminum salts such as aluminum hydroxide gel (alum) or aluminum phosphate; salts of calcium, iron or zinc; an insoluble suspension of acylated tyrosine; acylated sugars; cationically or anionically derivatized polysaccharides; polyphosphazenes; biodegradable microspheres; monophosphoryl lipid A and quil A. Cytokines, such as GM-CSF or interleukin-2, -7, or -12, may also be used as adjuvants.

[0536] The adjuvant composition may be designed to induce an immune response predominantly of the Th1 type. High levels of Th1-type cytokines (e.g., IFN-.gamma., TNF.alpha., IL-2 and IL-12) tend to favor the induction of cell mediated immune responses to an administered antigen. In contrast, high levels of Th2-type cytokines (e.g., IL-4, IL-5, IL-6 and IL-10) tend to favor the induction of humoral immune responses. Following application of an immunogenic composition as provided herein, the subject will support an immune response that includes Th1- and Th2-type responses. The levels of these cytokines may be readily assessed using standard assays. For a review of the families of cytokines, see Mosmann and Coffinan, Ann. Rev. Immunol. 7:145-173, 1989.

[0537] Preferred adjuvants for use in eliciting a predominantly Th1-type response include, for example, a combination of monophosphoryl lipid A, preferably 3-de-O-acylated monophosphoryl lipid A (3D-MPL), together with an aluminum salt. MPL adjuvants are available from Corixa Corporation (Seattle, Wash.; see U.S. Pat. Nos. 4,436,727; 4,877,611; 4,866,034 and 4,912,094). CpG-containing oligonucleotides (in which the CpG dinucleotide is unmethylated) also induce a predominantly Th1 response. Such oligonucleotides are well known and are described, for example, in WO 96/02555, WO 99/33488 and U.S. Pat. Nos. 6,008,200 and 5,856,462. Immunostimulatory DNA sequences are also described, for example, by Sato et al., Science 273:352, 1996. Another preferred adjuvant is a saponin, preferably QS21 (Aquila Biopharmaceuticals Inc., Framingham, Mass.), which may be used alone or in combination with other adjuvants. For example, an enhanced system involves the combination of a monophosphoryl lipid A and saponin derivative, such as the combination of QS21 and 3D-MPL as described in WO 94/00153, or a less reactogenic composition where the QS21 is quenched with cholesterol, as described in WO 96/33739. Other preferred formulations comprise an oil-in-water emulsion and tocopherol. A particularly potent adjuvant formulation involving QS21, 3D-MPL and tocopherol in an oil-in-water emulsion is described in WO 95/17210.

[0538] Other preferred adjuvants include Montanide ISA 720 (Seppic, France), SAF (Chiron, Calif., United States), ISCOMS (CSL), MF-59 (Chiron), the SBAS series of adjuvants (e.g., SBAS-2 or SBAS-4, available from SmithKline Beecham, Rixensart, Belgium), Detox (Corixa, Hamilton, Mont.), RC-529 (Corixa, Hamilton, Mont.) and other aminoalkyl glucosaminide 4-phosphates (AGPs), such as those described in pending U.S. patent application Ser. Nos. 08/853,826 and 09/074,720.

[0539] A delivery vehicle may be employed within the immunogenic composition of the present invention to facilitate production of an antigen-specific immune response that targets tumor cells. Delivery vehicles include antigen presenting cells (APCs), such as dendritic cells, macrophages, B cells, monocytes and other cells that may be engineered to be efficient APCs. Such cells may be genetically modified to increase the capacity for presenting the antigen, to improve activation and/or maintenance of the T cell response, to have anti-tumor effects per se and/or to be immunologically compatible with the receiver (i.e., matched HLA haplotype). APCs may generally be isolated from any of a variety of biological fluids and organs, including tumor and peritumoral tissues, and may be autologous, allogeneic, syngeneic or xenogeneic cells.

[0540] Dendritic cells are highly potent APCs (Banchereau and Steinman, Nature 392:245-251, 1998) and have been shown to be effective as a physiological adjuvant for eliciting prophylactic or therapeutic antitumor immunity (see Timmeman and Levy, Ann. Rev. Med. 50:507-529, 1999). In general, dendritic cells may be identified based on their typical shape (stellate in situ, with marked cytoplasmic processes (dendrites) visible in vitro), their ability to take up, process and present antigens with high efficiency and their ability to activate naive T cell responses. Dendritic cells may, of course, be engineered to express specific cell-surface receptors or ligands that are not commonly found on dendritic cells in vivo or ex vivo, and such modified dendritic cells are contemplated by the present invention. As an alternative to dendritic cells, secreted vesicles antigen-loaded dendritic cells (called exosomes) may be used within an immunogenic composition (see Zitvogel et al., Nature Med. 4:594-600, 1998).

[0541] Dendritic cells and progenitors may be obtained from peripheral blood, bone marrow, tumor-infiltrating cells, peritumoral tissues-infiltrating cells, lymph nodes, spleen, skin, umbilical cord blood or any other suitable tissue or fluid. For example, dendritic cells may be differentiated ex vivo by adding a combination of cytokines such as GM-CSF, IL-4, IL-13 and/or TNF.alpha. to cultures of monocytes harvested from peripheral blood. Alternatively, CD34 positive cells harvested from peripheral blood, umbilical cord blood or bone marrow may be differentiated into dendritic cells by adding to the culture medium combinations of GM-CSF, IL-3, TNF.alpha., CD40 ligand, LPS, flt3 ligand and/or other compound(s) that induce differentiation, maturation and proliferation of dendritic cells.

[0542] Dendritic cells are categorized as “immature” and “mature” cells, which allows a simple way to discriminate between two well characterized phenotypes. Immature dendritic cells are characterized as APC with a high capacity for antigen uptake and processing, which correlates with the high expression of Fcy receptor and mannose receptor. The mature phenotype is typically characterized by a lower expression of these markers, but a high expression of cell surface molecules responsible for T cell activation such as class I and class II MHC, adhesion molecules (e.g., CD54 and CD11) and costimulatory molecules (e.g., CD40, CD80, CD86 and 4-1BB).

[0543] APCs may generally be transfected with at least one polynucleotide encoding a polypeptide of the present invention, such that variant II, or an immunogenic portion thereof, is expressed on the cell surface. Such transfection may take place ex vivo, and a composition comprising such transfected cells may then be used for therapeutic purposes, as described herein. Alternatively, a gene delivery vehicle that targets a dendritic or other antigen presenting cell may be administered to the subject, resulting in transfection that occurs in vivo. In vivo and ex vivo transfection of dendritic cells, for example, may generally be performed using any methods known in the art, such as those described in WO 97/24447, or the gene gun approach described by Mahvi et al., Immunology and cell Biology 75:456-460, 1997. Antigen loading of dendritic cells may be achieved by incubating dendritic cells or progenitor cells with a polypeptide of the present inventio, DNA (naked or within a plasmid vector) or RNA; or with antigen-expressing recombinant bacterium or viruses (e.g., vaccinia, fowlpox, adenovirus or lentivirus vectors). Prior to loading, the polypeptide may be covalently conjugated to an immunological partner that provides T cell help (e.g., a carrier molecule) such as described above. Alternatively, a dendritic cell may be pulsed with a non-conjugated immunological partner, separately or in the presence of the polypeptide.

[0544] Preferred embodiments of the present invention encompass novel naturally occurring secreted (i.e., extracellular) and non-secreted (i.e., intracellular or membranal) variants of genes and gene products, which, as is described in the Examples section which follows, play pivotal roles in disease onset and progression. As such these variants can be used for a wide range of diagnostic and/or therapeutic uses.

[0545] Diagnostic Methods

[0546] The term “marker” in the context of the present invention refers to a nucleic acid fragment, a peptide, or a polypeptide, which is differentially present in a sample taken from patients having or predisposed to a cluster or protein-related disease, disorder or condition as compared to a comparable sample taken from subjects who do not have a such a disease, disorder or condition. For example, optionally the presence or absence or level of a calcium splice variant according to the present invention may optionally be measured as a diagnostic for a disease and/or disorder. More preferably, at least one therapy is selected according to such a diagnosis.

[0547] The methods for detecting these markers have many applications. For example, one marker or combination of markers can be measured to differentiate between various types of cluster or protein-related disease, disorder or condition, and thus are useful as an aid in the accurate diagnosis of cluster or protein-related disease, disorder or condition in a patient. For example, one marker or combination of markers can be measured to differentiate between various types of lung cancers, such as small cell or non-small cell lung cancer, and further between non-small cell lung cancer types, such as adenocarcinomas, squamous cell and large cell carcinomas, and thus are useful as an aid in the accurate diagnosis of lung cancer in a patient. In another example, the present methods for detecting these markers can be applied to in vitro cluster or protein-related cancers cells or in vivo animal models for cluster or protein-related cancers to assay for and identify compounds that modulate expression of these markers.

[0548] The phrase “differentially present” refers to differences in the quantity of a marker present in a sample taken from patients having cluster or protein-related disease, disorder or condition as compared to a comparable sample taken from patients who do not have such disease, disorder or condition. For example, a nucleic acid fragment may optionally be differentially present between the two samples if the amount of the nucleic acid fragment in one sample is significantly different from the amount of the nucleic acid fragment in the other sample, for example as measured by hybridization and/or NAT-based assays. A polypeptide is differentially present between the two samples if the amount of the polypeptide in one sample is significantly different from the amount of the polypeptide in the other sample. It should be noted that if the marker is detectable in one sample and not detectable in the other, then such a marker can be considered to be differentially present. One of ordinary skill in the art could easily determine such relative levels of the markers; further guidance is provided below.

[0549] As used herein the phrase “diagnostic” means identifying the presence or nature of a pathologic condition. Diagnostic methods differ in their sensitivity and specificity. The “sensitivity” of a diagnostic assay is the percentage of diseased individuals who test positive (percent of “true positives”). Diseased individuals not detected by the assay are “false negatives.” Subjects who are not diseased and who test negative in the assay are termed “true negatives.” The “specificity” of a diagnostic assay is 1 minus the false positive rate, where the “false positive” rate is defined as the proportion of those without the disease who test positive. While a particular diagnostic method may not provide a definitive diagnosis of a condition, it suffices if the method provides a positive indication that aids in diagnosis.

[0550] The phrase “predisposition” used herein refers to the susceptibility to develop a disorder. A subject with a predisposition to develop a disorder is more likely to develop the disorder than a non-predisposed subject.

[0551] As used herein the phrase “diagnosing” refers to classifying a disease or a symptom, determining a severity of the disease, monitoring disease progression, forecasting an outcome of a disease and/or prospects of recovery. The term “detecting” may also optionally encompass any of the above.

[0552] Diagnosis of a disease according to the present invention can be effected by determining a level of a polynucleotide or a polypeptide of the present invention in a biological sample obtained from the subject, wherein the level determined can be correlated with predisposition to, or presence or absence of the disease.

[0553] As used herein “a biological sample” refers to a sample of tissue or fluid isolated from a subject, including but not limited to, for example, plasma, serum, spinal fluid, lymph fluid, the external sections of the skin, respiratory, intestinal, and genitourinary tracts, tears, saliva, sputum, milk, blood cells, tumors, neuronal tissue, organs, and also samples of in vivo cell culture constituents. It should be noted that a “biological sample obtained from the subject” may also optionally comprise a sample that has not been physically removed from the subject, as described in greater detail below.

[0554] As used herein, the term “level” refers to expression levels of RNA and/or protein or to DNA copy number of a marker of the present invention.

[0555] Typically the level of the marker in a biological sample obtained from the subject is different (i.e., increased or decreased) from the level of the same variant in a similar sample obtained from a healthy individual.

[0556] Numerous well known tissue or fluid collection methods can be utilized to collect the biological sample from the subject in order to determine the level of DNA, RNA and/or polypeptide of the variant of interest in the subject.

[0557] Examples include, but are not limited to, fine needle biopsy, needle biopsy, core needle biopsy and surgical biopsy (e.g., brain biopsy), and lavage. Regardless of the procedure employed, once a biopsy/sample is obtained the level of the variant can be determined and a diagnosis can thus be made.

[0558] Determining the level of the same variant in normal tissues of the same origin is preferably effected along-side to detect an elevated expression and/or amplification and/or a decreased expression, of the variant as opposed to the normal tissues.

[0559] A “test amount” of a marker refers to an amount of a marker in a subject's sample that is consistent with a diagnosis of a cluster or protein-related disease, disorder or condition related cancer or other UbcH10 related disease. A test amount can be either in absolute amount (e.g., microgram/ml) or a relative amount (e.g., relative intensity of signals).

[0560] A “control amount” of a marker can be any amount or a range of amounts to be compared against a test amount of a marker. For example, a control amount of a marker can be the amount of a marker in a patient which does not have the cluster or protein-related disease, disorder or condition. A control amount can be either in absolute amount (e.g., microgram/ml) or a relative amount (e.g., relative intensity of signals).

[0561] “Detect” refers to identifying the presence, absence or amount of the object to be detected.

[0562] A “label” includes any moiety or item detectable by spectroscopic, photo chemical, biochemical, immunochemical, or chemical means. For example, useful labels include ³²P, ³⁵S, fluorescent dyes, electron-dense reagents, enzymes (e.g., as commonly used in an ELISA), biotin-streptavidin, digoxigenin, haptens and proteins for which antisera or monoclonal antibodies are available, or nucleic acid molecules with a sequence complementary to a target. The label often generates a measurable signal, such as a radioactive, chromogenic, or fluorescent signal, that can be used to quantify the amount of bound label in a sample. The label can be incorporated in or attached to a primer or probe either covalently, or through ionic, van der Waals or hydrogen bonds, e.g., incorporation of radioactive nucleotides, or biotinylated nucleotides that are recognized by streptavidin. The label may be directly or indirectly detectable. Indirect detection can involve the binding of a second label to the first label, directly or indirectly. For example, the label can be the ligand of a binding partner, such as biotin, which is a binding partner for streptavidin, or a nucleotide sequence, which is the binding partner for a complementary sequence, to which it can specifically hybridize. The binding partner may itself be directly detectable, for example, an antibody may be itself labeled with a fluorescent molecule. The binding partner also may be indirectly detectable, for example, a nucleic acid having a complementary nucleotide sequence can be a part of a branched DNA molecule that is in turn detectable through hybridization with other labeled nucleic acid molecules (see, e.g., P. D. Fahrlander and A. Klausner, Bio/Technology 6:1165 (1988)). Quantitation of the signal is achieved by, e.g., scintillation counting, densitometry, or flow cytometry.

[0563] Exemplary detectable labels, optionally and preferably for use with immunoassays, include but are not limited to magnetic beads, fluorescent dyes, radiolabels, enzymes (e.g., horse radish peroxide, alkaline phosphatase and others commonly used in an ELISA), and calorimetric labels such as colloidal gold or colored glass or plastic beads. Alternatively, the marker in the sample can be detected using an indirect assay, wherein, for example, a second, labeled antibody is used to detect bound marker-specific antibody, and/or in a competition or inhibition assay wherein, for example, a monoclonal antibody which binds to a distinct epitope of the marker are incubated simultaneously with the mixture.

[0564] “Immunoassay” is an assay that uses an antibody to specifically bind an antigen. The immunoassay is characterized by the use of specific binding properties of a particular antibody to isolate, target, and/or quantify the antigen.

[0565] The phrase “specifically (or selectively) binds” to an antibody or “specifically (or selectively) immunoreactive with” when referring to a protein or peptide (or other epitope), refers to a binding reaction that is determinative of the presence of the protein in a heterogeneous population of proteins and other biologics. Thus, under designated immunoassay conditions, the specified antibodies bind to a particular protein at least two times greater than the background (non-specific signal) and do not substantially bind in a significant amount to other proteins present in the sample. Specific binding to an antibody under such conditions may require an antibody that is selected for its specificity for a particular protein. For example, polyclonal antibodies raised to seminal basic protein from specific species such as rat, mouse, or human can be selected to obtain only those polyclonal antibodies that are specifically immunoreactive with seminal basic protein and not with other proteins, except for polymorphic variants and alleles of seminal basic protein. This selection may be achieved by subtracting out antibodies that cross-react with seminal basic protein molecules from other species. A variety of immunoassay formats may be used to select antibodies specifically immunoreactive with a particular protein. For example, solid-phase ELISA immunoassays are routinely used to select antibodies specifically immunoreactive with a protein (see, e.g., Harlow & Lane, Antibodies, A Laboratory Manual (1988), for a description of immunoassay formats and conditions that can be used to determine specific immunoreactivity). Typically a specific or selective reaction will be at least twice background signal or noise and more typically more than 10 to 100 times background.

[0566] In another embodiment, this invention provides antibodies specifically recognizing the splice variants and polypeptide fragments thereof of this invention. Preferably such antibodies differentially recognize splice variants of the present invention but do not recognize a corresponding known protein (such known proteins are discussed with regard to their splice variants in the Examples below).

[0567] In another embodiment, this invention provides a method for detecting a splice variant according to the present invention in a biological sample, comprising: contacting a biological sample with an antibody specifically recognizing a splice variant according to the present invention under conditions whereby the antibody specifically interacts with the splice variant in the biological sample but do not recognize known corresponding proteins (wherein the known protein is discussed with regard to its splice variant(s) in the Examples below), and detecting the interaction; wherein the presence of an interaction correlates with the presence of a splice variant in the biological sample.

[0568] In another embodiment, this invention provides a method for detecting a splice variant nucleic acid sequences in a biological sample, comprising: hybridizing the isolated nucleic acid molecules or oligonucleotide fragments of at least about a minimum length to a nucleic acid material of a biological sample and detecting a hybridization complex; wherein the presence of a hybridization complex correlates with the presence of a splice variant nucleic acid sequence in the biological sample.

[0569] According to another embodiment of the present invention the detection of the splice variant nucleic acid sequences in the biological sample is effected by detecting at least one nucleic acid change within a nucleic acid material derived from the biological sample; wherein the presence of the at least one nucleic acid change correlates with the presence of a splice variant nucleic acid sequence in the biological sample.

[0570] According to the present invention, the splice variants described herein are non-limiting examples of markers for diagnosing the cluster or protein-related disease, disorder or condition. Each splice variant marker of the present invention can be used alone or in combination, for various uses, including but not limited to, prognosis, prediction, screening, early diagnosis, determination of progression, therapy selection and treatment monitoring of such a cancer, disease or pathology.

[0571] According to optional but preferred embodiments of the present invention, any marker according to the present invention may optionally be used alone or combination. Such a combination may optionally comprise a plurality of markers described herein, optionally including any subcombination of markers, and/or a combination featuring at least one other marker, for example a known marker. Furthermore, such a combination may optionally and preferably be used as described above with regard to determining a ratio between a quantitative or semi-quantitative measurement of any marker described herein to any other marker described herein, and/or any other known marker, and/or any other marker. With regard to such a ratio between any marker described herein (or a combination thereof) and a known marker, more preferably the known marker comprises the “known protein” as described in greater detail below with regard to each cluster or gene.

[0572] According to other preferred embodiments of the present invention, a splice variant protein or a fragment thereof, or a splice variant nucleic acid sequence or a fragment thereof, may be featured as a biomarker for detecting the cluster or protein-related disease, disorder or condiiton, such that a biomarker may optionally comprise any of the above.

[0573] Non-limiting examples of methods or assays are described below.

[0574] The present invention also relates to kits based upon such diagnostic methods or assays.

[0575] NAT Assays

[0576] Detection of a nucleic acid of interest in a biological sample may also optionally be effected by NAT-based assays, which involve nucleic acid amplification technology, such as PCR, or variations thereof (e.g., real-time PCR, RT-PCR and in situ RT-PCR).

[0577] As used herein, a “primer” defines an oligonucleotide which is capable of annealing to (hybridizing with) a target sequence, thereby creating a double stranded region which can serve as an initiation point for DNA synthesis under suitable conditions.

[0578] Amplification of a selected, or target, nucleic acid sequence may be carried out by a number of suitable methods. See generally Kwoh et al., 1990, Am. Biotechnol. Lab. 8:14. Numerous amplification techniques have been described and can be readily adapted to suit particular needs of a person of ordinary skill. Non-limiting examples of amplification techniques include polymerase chain reaction (PCR), ligase chain reaction (LCR), strand displacement amplification (SDA), transcription-based amplification, the q3 replicase system and NASBA (Kwoh et al., 1989, Proc. Natl. Acad. Sci. USA 86, 1173-1177; Lizardi et al., 1988, BioTechnology 6:1197-1202; Malek et al., 1994, Methods Mol. Biol., 28:253-260; and Sambrook et al., 1989, supra).

[0579] The terminology “amplification pair” (or “primer pair”) refers herein to a pair of oligonucleotides (oligos) of the present invention, which are selected to be used together in amplifying a selected nucleic acid sequence by one of a number of types of amplification processes, preferably a polymerase chain reaction. Other types of amplification processes include ligase chain reaction, strand displacement amplification, or nucleic acid sequence-based amplification, as explained in greater detail below. As commonly known in the art, the oligos are designed to bind to a complementary sequence under selected conditions.

[0580] In one particular embodiment, amplification of a nucleic acid sample from a patient is amplified under conditions which favor the amplification of the most abundant differentially expressed nucleic acid. In one preferred embodiment, RT-PCR is carried out on an mRNA sample from a patient under conditions which favor the amplification of the most abundant mRNA. In another preferred embodiment, the amplification of the differentially expressed nucleic acids is carried out simultaneously. It will be realized by a person skilled in the art that such methods could be adapted for the detection of differentially expressed proteins instead of differentially expressed nucleic acid sequences.

[0581] The nucleic acid (i.e. DNA or RNA) for practicing the present invention may be obtained according to well known methods.

[0582] Oligonucleotide primers of the present invention may be of any suitable length, depending on the particular assay format and the particular needs and targeted genomes employed. Optionally, the oligonucleotide primers are at least 12 nucleotides in length, preferably between 15 and 24 molecules, and they may be adapted to be especially suited to a chosen nucleic acid amplification system. As commonly known in the art, the oligonucleotide primers can be designed by taking into consideration the melting point of hybridization thereof with its targeted sequence (Sambrook et al., 1989, Molecular Cloning—A Laboratory Manual, 2nd Edition, CSH Laboratories; Ausubel et al., 1989, in Current Protocols in Molecular Biology, John Wiley & Sons Inc., N.Y.).

[0583] It will be appreciated that antisense oligonucleotides may be employed to quantify expression of a splice isoform of interest. Such detection is effected at the pre-mRNA level. Essentially the ability to quantitate transcription from a splice site of interest can be effected based on splice site accessibility. Oligonucleotides may compete with splicing factors for the splice site sequences. Thus, low activity of the antisense oligonucleotide is indicative of splicing activity.

[0584] The polymerase chain reaction and other nucleic acid amplification reactions are well known in the art (various non-limiting examples of these reactions are described in greater detail below). The pair of oligonucleotides according to this aspect of the present invention are preferably selected to have compatible melting temperatures (Tm), e.g., melting temperatures which differ by less than that 7° C., preferably less than 5° C., more preferably less than 4° C., most preferably less than 3° C., ideally between 3° C. and 0° C.

[0585] Polymerase Chain Reaction (PCR): The polymerase chain reaction (PCR), as described in U.S. Pat. Nos. 4,683,195 and 4,683,202 to Mullis and Mullis et al., is a method of increasing the concentration of a segment of target sequence in a mixture of genomic DNA without cloning or purification. This technology provides one approach to the problems of low target sequence concentration. PCR can be used to directly increase the concentration of the target to an easily detectable level. This process for amplifying the target sequence involves the introduction of a molar excess of two oligonucleotide primers which are complementary to their respective strands of the double-stranded target sequence to the DNA mixture containing the desired target sequence. The mixture is denatured and then allowed to hybridize. Following hybridization, the primers are extended with polymerase so as to form complementary strands. The steps of denaturation, hybridization (annealing), and polymerase extension (elongation) can be repeated as often as needed, in order to obtain relatively high concentrations of a segment of the desired target sequence.

[0586] The length of the segment of the desired target sequence is determined by the relative positions of the primers with respect to each other, and, therefore, this length is a controllable parameter. Because the desired segments of the target sequence become the dominant sequences (in terms of concentration) in the mixture, they are the to be “PCR-amplified.”

[0587] Ligase Chain Reaction (LCR or LAR): The ligase chain reaction [LCR; sometimes referred to as “Ligase Amplification Reaction” (LAR)] has developed into a well-recognized alternative method of amplifying nucleic acids. In LCR, four oligonucleotides, two adjacent oligonucleotides which uniquely hybridize to one strand of target DNA, and a complementary set of adjacent oligonucleotides, which hybridize to the opposite strand are mixed and DNA ligase is added to the mixture. Provided that there is complete complementarity at the junction, ligase will covalently link each set of hybridized molecules. Importantly, in LCR, two probes are ligated together only when they base-pair with sequences in the target sample, without gaps or mismatches. Repeated cycles of denaturation, and ligation amplify a short segment of DNA. LCR has also been used in combination with PCR to achieve enhanced detection of single-base changes: see for example Segev, PCT Publication No. W09001069 A1 (1990). However, because the four oligonucleotides used in this assay can pair to form two short ligatable fragments, there is the potential for the generation of target-independent background signal. The use of LCR for mutant screening is limited to the examination of specific nucleic acid positions.

[0588] Self-Sustained Synthetic Reaction (3SR/NASBA): The self-sustained sequence replication reaction (3SR) is a transcription-based in vitro amplification system that can exponentially amplify RNA sequences at a uniform temperature. The amplified RNA can then be utilized for mutation detection. In this method, an oligonucleotide primer is used to add a phage RNA polymerase promoter to the 5′ end of the sequence of interest. In a cocktail of enzymes and substrates that includes a second primer, reverse transcriptase, RNase H, RNA polymerase and ribo-and deoxyribonucleoside triphosphates, the target sequence undergoes repeated rounds of transcription, cDNA synthesis and second-strand synthesis to amplify the area of interest. The use of 3SR to detect mutations is kinetically limited to screening small segments of DNA (e.g., 200-300 base pairs).

[0589] Q-Beta (Qβ) Replicase: In this method, a probe which recognizes the sequence of interest is attached to the replicatable RNA template for Qβ replicase. A previously identified major problem with false positives resulting from the replication of unhybridized probes has been addressed through use of a sequence-specific ligation step. However, available thermostable DNA ligases are not effective on this RNA substrate, so the ligation must be performed by T4 DNA ligase at low temperatures (37 degrees C.). This prevents the use of high temperature as a means of achieving specificity as in the LCR, the ligation event can be used to detect a mutation at the junction site, but not elsewhere.

[0590] A successful diagnostic method must be very specific. A straight-forward method of controlling the specificity of nucleic acid hybridization is by controlling the temperature of the reaction. While the 3SR/NASBA, and Qβ systems are all able to generate a large quantity of signal, one or more of the enzymes involved in each cannot be used at high temperature (i.e., >55 degrees C.). Therefore the reaction temperatures cannot be raised to prevent non-specific hybridization of the probes. If probes are shortened in order to make them melt more easily at low temperatures, the likelihood of having more than one perfect match in a complex genome increases. For these reasons, PCR and LCR currently dominate the research field in detection technologies.

[0591] The basis of the amplification procedure in the PCR and LCR is the fact that the products of one cycle become usable templates in all subsequent cycles, consequently doubling the population with each cycle. The final yield of any such doubling system can be expressed as: (1+X)n=y, where “X” is the mean efficiency (percent copied in each cycle), “n” is the number of cycles, and “y” is the overall efficiency, or yield of the reaction. If every copy of a target DNA is utilized as a template in every cycle of a polymerase chain reaction, then the mean efficiency is 100%. If 20 cycles of PCR are performed, then the yield will be 220, or 1,048,576 copies of the starting material. If the reaction conditions reduce the mean efficiency to 85%, then the yield in those 20 cycles will be only 1.8520, or 220,513 copies of the starting material. In other words, a PCR running at 85% efficiency will yield only 21% as much final product, compared to a reaction running at 100% efficiency. A reaction that is reduced to 50% mean efficiency will yield less than 1% of the possible product.

[0592] In practice, routine polymerase chain reactions rarely achieve the theoretical maximum yield, and PCRs are usually run for more than 20 cycles to compensate for the lower yield. At 50% mean efficiency, it would take 34 cycles to achieve the million-fold amplification theoretically possible in 20, and at lower efficiencies, the number of cycles required becomes prohibitive. In addition, any background products that amplify with a better mean efficiency than the intended target will become the dominant products.

[0593] Also, many variables can influence the mean efficiency of PCR, including target DNA length and secondary structure, primer length and design, primer and dNTP concentrations, and buffer composition, to name but a few. Contamination of the reaction with exogenous DNA (e.g., DNA spilled onto lab surfaces) or cross-contamination is also a major consideration. Reaction conditions must be carefully optimized for each different primer pair and target sequence, and the process can take days, even for an experienced investigator. The laboriousness of this process, including numerous technical considerations and other factors, presents a significant drawback to using PCR in the clinical setting. Indeed, PCR has yet to penetrate the clinical market in a significant way. The same concerns arise with LCR, as LCR must also be optimized to use different oligonucleotide sequences for each target sequence. In addition, both methods require expensive equipment, capable of precise temperature cycling.

[0594] Many applications of nucleic acid detection technologies, such as in studies of allelic variation, involve not only detection of a specific sequence in a complex background, but also the discrimination between sequences with few, or single, nucleotide differences. One method of the detection of allele-specific variants by PCR is based upon the fact that it is difficult for Taq polymerase to synthesize a DNA strand when there is a mismatch between the template strand and the 3′ end of the primer. An allele-specific variant may be detected by the use of a primer that is perfectly matched with only one of the possible alleles; the mismatch to the other allele acts to prevent the extension of the primer, thereby preventing the amplification of that sequence. This method has a substantial limitation in that the base composition of the mismatch influences the ability to prevent extension across the mismatch, and certain mismatches do not prevent extension or have only a minimal effect.

[0595] A similar 3′-mismatch strategy is used with greater effect to prevent ligation in the LCR. Any mismatch effectively blocks the action of the thermostable ligase, but LCR still has the drawback of target-independent background ligation products initiating the amplification. Moreover, the combination of PCR with subsequent LCR to identify the nucleotides at individual positions is also a clearly cumbersome proposition for the clinical laboratory.

[0596] The direct detection method according to various preferred embodiments of the present invention may be, for example a cycling probe reaction (CPR) or a branched DNA analysis.

[0597] When a sufficient amount of a nucleic acid to be detected is available, there are advantages to detecting that sequence directly, instead of making more copies of that target, (e.g., as in PCR and LCR). Most notably, a method that does not amplify the signal exponentially is more amenable to quantitative analysis. Even if the signal is enhanced by attaching multiple dyes to a single oligonucleotide, the correlation between the final signal intensity and amount of target is direct. Such a system has an additional advantage that the products of the reaction will not themselves promote further reaction, so contamination of lab surfaces by the products is not as much of a concern. Recently devised techniques have sought to eliminate the use of radioactivity and/or improve the sensitivity in automatable formats. Two examples are the “Cycling Probe Reaction” (CPR), and “Branched DNA” (bDNA).

[0598] Cycling probe reaction (CPR): The cycling probe reaction (CPR), uses a long chimeric oligonucleotide in which a central portion is made of RNA while the two termini are made of DNA. Hybridization of the probe to a target DNA and exposure to a thermostable RNase H causes the RNA portion to be digested. This destabilizes the remaining DNA portions of the duplex, releasing the remainder of the probe from the target DNA and allowing another probe molecule to repeat the process. The signal, in the form of cleaved probe molecules, accumulates at a linear rate. While the repeating process increases the signal, the RNA portion of the oligonucleotide is vulnerable to RNases that may carried through sample preparation.

[0599] Branched DNA: Branched DNA (bDNA), involves oligonucleotides with branched structures that allow each individual oligonucleotide to carry 35 to 40 labels (e.g., alkaline phosphatase enzymes). While this enhances the signal from a hybridization event, signal from non-specific binding is similarly increased.

[0600] The NAT assays of the present invention also include methods of detecting at least one nucleic acid change [e.g., a single nucleotide polymorphism (SNP] in the biological sample of the present invention.

[0601] The demand for tests which allow the detection of specific nucleic acid sequences and sequence changes is growing rapidly in clinical diagnostics. As nucleic acid sequence data for genes from humans and pathogenic organisms accumulates, the demand for fast, cost-effective, and easy-to-use tests for as yet mutations within specific sequences is rapidly increasing.

[0602] A handful of methods have been devised to scan nucleic acid segments for mutations or nucleic acid changes. One option is to determine the entire gene sequence of each test sample (e.g., a bacterial isolate). For sequences under approximately 600 nucleotides, this may be accomplished using amplified material (e.g., PCR reaction products). This avoids the time and expense associated with cloning the segment of interest. However, specialized equipment and highly trained personnel are required, and the method is too labor-intense and expensive to be practical and effective in the clinical setting.

[0603] In view of the difficulties associated with sequencing, a given segment of nucleic acid may be characterized on several other levels. At the lowest resolution, the size of the molecule can be determined by electrophoresis by comparison to a known standard run on the same gel. A more detailed picture of the molecule may be achieved by cleavage with combinations of restriction enzymes prior to electrophoresis, to allow construction of an ordered map. The presence of specific sequences within the fragment can be detected by hybridization of a labeled probe, or the precise nucleotide sequence can be determined by partial chemical degradation or by primer extension in the presence of chain-terminating nucleotide analogs.

[0604] Restriction fragment length polymorphism (RFLP): For detection of single-base differences between like sequences, the requirements of the analysis are often at the highest level of resolution. For cases in which the position of the nucleotide in question is known in advance, several methods have been developed for examining single base changes without direct sequencing. For example, if a mutation of interest happens to fall within a restriction recognition sequence, a change in the pattern of digestion can be used as a diagnostic tool (e.g., restriction fragment length polymorphism [RFLP] analysis).

[0605] Single point mutations have been also detected by the creation or destruction of RFLPs. Mutations are detected and localized by the presence and size of the RNA fragments generated by cleavage at the mismatches. Single nucleotide mismatches in DNA heteroduplexes are also recognized and cleaved by some chemicals, providing an alternative strategy to detect single base substitutions, generically named the “Mismatch Chemical Cleavage” (MCC). However, this method requires the use of osmium tetroxide and piperidine, two highly noxious chemicals which are not suited for use in a clinical laboratory.

[0606] RFLP analysis suffers from low sensitivity and requires a large amount of sample. When RFLP analysis is used for the detection of point mutations, it is, by its nature, limited to the detection of only those single base changes which fall within a restriction sequence of a known restriction endonuclease. Moreover, the majority of the available enzymes have 4 to 6 base-pair recognition sequences, and cleave too frequently for many large-scale DNA manipulations. Thus, it is applicable only in a small fraction of cases, as most mutations do not fall within such sites.

[0607] A handful of rare-cutting restriction enzymes with 8 base-pair specificities have been isolated and these are widely used in genetic mapping, but these enzymes are few in number, are limited to the recognition of G+C-rich sequences, and cleave at sites that tend to be highly clustered. Recently, endonucleases encoded by group I introns have been discovered that might have greater than 12 base-pair specificity, but again, these are few in number.

[0608] Allele specific oligonucleotide (ASO): If the change is not in a recognition sequence, then allele-specific oligonucleotides (ASOs), can be designed to hybridize in proximity to the mutated nucleotide, such that a primer extension or ligation event can bused as the indicator of a match or a mis-match. Hybridization with radioactively labeled allelic specific oligonucleotides (ASO) also has been applied to the detection of specific point mutations. The method is based on the differences in the melting temperature of short DNA fragments differing by a single nucleotide. Stringent hybridization and washing conditions can differentiate between mutant and wild-type alleles. The ASO approach applied to PCR products also has been extensively utilized by various researchers to detect and characterize point mutations in ras genes and gsp/gip oncogenes. Because of the presence of various nucleotide changes in multiple positions, the ASO method requires the use of many oligonucleotides to cover all possible oncogenic mutations.

[0609] With either of the techniques described above (i.e., RFLP and ASO), the precise location of the suspected mutation must be known in advance of the test. That is to say, they are inapplicable when one needs to detect the presence of a mutation within a gene or sequence of interest.

[0610] Denaturing/Temperature Gradient Gel Electrophoresis (DGGE/TGGE): Two other methods rely on detecting changes in electrophoretic mobility in response to minor sequence changes. One of these methods, termed “Denaturing Gradient Gel Electrophoresis” (DGGE) is based on the observation that slightly different sequences will display different patterns of local melting when electrophoretically resolved on a gradient gel. In this manner, variants can be distinguished, as differences in melting properties of homoduplexes versus heteroduplexes differing in a single nucleotide can detect the presence of mutations in the target sequences because of the corresponding changes in their electrophoretic mobilities. The fragments to be analyzed, usually PCR products, are “clamped” at one end by a long stretch of G−C base pairs (30-80) to allow complete denaturation of the sequence of interest without complete dissociation of the strands. The attachment of a GC “clamp” to the DNA fragments increases the fraction of mutations that can be recognized by DGGE. Attaching a GC clamp to one primer is critical to ensure that the amplified sequence has a low dissociation temperature. Modifications of the technique have been developed, using temperature gradients, and the method can be also applied to RNA:RNA duplexes.

[0611] Limitations on the utility of DGGE include the requirement that the denaturing conditions must be optimized for each type of DNA to be tested. Furthermore, the method requires specialized equipment to prepare the gels and maintain the needed high temperatures during electrophoresis. The expense associated with the synthesis of the clamping tail on one oligonucleotide for each sequence to be tested is also a major consideration. In addition, long running times are required for DGGE. The long running time of DGGE was shortened in a modification of DGGE called constant denaturant gel electrophoresis (CDGE). CDGE requires that gels be performed under different denaturant conditions in order to reach high efficiency for the detection of mutations.

[0612] A technique analogous to DGGE, termed temperature gradient gel electrophoresis (TGGE), uses a thermal gradient rather than a chemical denaturant gradient. TGGE requires the use of specialized equipment which can generate a temperature gradient perpendicularly oriented relative to the electrical field. TGGE can detect mutations in relatively small fragments of DNA therefore scanning of large gene segments requires the use of multiple PCR products prior to running the gel.

[0613] Single-Strand Conformation Polymorphism (SSCP): Another common method, called “Single-Strand Conformation Polymorphism” (SSCP) was developed by Hayashi, Sekya and colleagues and is based on the observation that single strands of nucleic acid can take on characteristic conformations in non-denaturing conditions, and these conformations influence electrophoretic mobility. The complementary strands assume sufficiently different structures that one strand may be resolved from the other. Changes in sequences within the fragment will also change the conformation, consequently altering the mobility and allowing this to be used as an assay for sequence variations.

[0614] The SSCP process involves denaturing a DNA segment (e.g., a PCR product) that is labeled on both strands, followed by slow electrophoretic separation on a non-denaturing polyacrylamide gel, so that intra-molecular interactions can form and not be disturbed during the run. This technique is extremely sensitive to variations in gel composition and temperature. A serious limitation of this method is the relative difficulty encountered in comparing data generated in different laboratories, under apparently similar conditions.

[0615] Dideoxy fingerprinting (ddF): The dideoxy fingerprinting (ddF) is another technique developed to scan genes for the presence of mutations. The ddF technique combines components of Sanger dideoxy sequencing with SSCP. A dideoxy sequencing reaction is performed using one dideoxy terminator and then the reaction products are electrophoresed on nondenaturing polyacrylamide gels to detect alterations in mobility of the termination segments as in SSCP analysis. While ddF is an improvement over SSCP in terms of increased sensitivity, ddF requires the use of expensive dideoxynucleotides and this technique is still limited to the analysis of fragments of the size suitable for SSCP (i.e., fragments of 200-300 bases for optimal detection of mutations).

[0616] In addition to the above limitations, all of these methods are limited as to the size of the nucleic acid fragment that can be analyzed. For the direct sequencing approach, sequences of greater than 600 base pairs require cloning, with the consequent delays and expense of either deletion sub-cloning or primer walking, in order to cover the entire fragment. SSCP and DGGE have even more severe size limitations. Because of reduced sensitivity to sequence changes, these methods are not considered suitable for larger fragments. Although SSCP is reportedly able to detect 90% of single-base substitutions within a 200 base-pair fragment, the detection drops to less than 50% for 400 base pair fragments. Similarly, the sensitivity of DGGE decreases as the length of the fragment reaches 500 base-pairs. The ddF technique, as a combination of direct sequencing and SSCP, is also limited by the relatively small size of the DNA that can be screened.

[0617] Reverse dot blot: This technique uses labeled sequence specific oligonucleotide probes and unlabeled nucleic acid samples. Activated primary amine-conjugated oligonucleotides are covalently attached to carboxylated nylon membranes. After hybridization and washing, the labeled probe, or a labeled fragment of the probe, can be released using oligomer restriction, i.e., the digestion of the duplex hybrid with a restriction enzyme. Circular spots or lines are visualized calorimetrically after hybridization through the use of streptavidin horseradish peroxidase incubation followed by development using tetramethylbenzidine and hydrogen peroxide, or via chemiluminescence after incubation with avidin alkaline phosphatase conjugate and a luminous substrate susceptible to enzyme activation, such as CSPD, followed by exposure to x-ray film.

[0618] It will be appreciated that advances in the field of SNP detection have provided additional accurate, easy, and inexpensive large-scale SNP genotyping techniques, such as Pyrosequencing™, Acycloprime™, dynamic allele-specific hybridization (DASH, Howell, W. M. et al., 1999. Dynamic allele-specific hybridization (DASH). Nat. Biotechnol. 17: 87-8), microplate array diagonal gel electrophoresis [MADGE, Day, I. N. et al., 1995. High-throughput genotyping using horizontal polyacrylamide gels with wells arranged for microplate array diagonal gel electrophoresis (MADGE). Biotechniques. 19: 830-5], the TaqMan system (Holland, P. M. et al., 1991. Detection of specific polymerase chain reaction product by utilizing the 5′→3′ exonuclease activity of Thermus aquaticus DNA polymerase. Proc Natl Acad Sci U S A. 88: 7276-80), as well as various DNA “chip” technologies such as the GeneChip microarrays (e.g., Affymetrix SNP chips) which are disclosed in U.S. Pat. No. 6,300,063 to Lipshutz, et al. 2001, which is fully incorporated herein by reference, Genetic Bit Analysis (GBA™) which is described by Goelet, P. et al. (PCT Appl. No. 92/15712), peptide nucleic acid (PNA, Ren B, et al., 2004. Nucleic Acids Res. 32: e42) and locked nucleic acids (LNA, Latorra D, et al., 2003. Hum. Mutat. 22: 79-85) probes, Molecular Beacons (Abravaya K, et al., 2003. Clin Chem Lab Med. 41: 468-74), intercalating dye [Germer, S. and Higuchi, R. Single-tube genotyping without oligonucleotide probes. Genome Res. 9:72-78 (1999)], FRET primers (Solinas A et al., 2001. Nucleic Acids Res. 29: E96), AlphaScreen (Beaudet L, et al., Genome Res. 2001, 11(4): 600-8), SNPstream (Bell P A, et al., 2002. Biotechniques. Suppl.: 70-2, 74, 76-7), Multiplex minisequencing (Curcio M, et al., 2002. Electrophoresis. 23: 1467-72), SnaPshot (Turner D, et al., 2002. Hum Immunol. 63: 508-13), MassEXTEND (Cashman J R, et al., 2001. Drug Metab Dispos. 29: 1629-37), GOOD assay (Sauer S, and Gut I G. 2003. Rapid Commun. Mass. Spectrom. 17: 1265-72), Microarray minisequencing (Liljedahl U, et al., 2003. Pharmacogenetics. 13: 7-17), arrayed primer extension (APEX) (Tonisson N, et al., 2000. Clin. Chem. Lab. Med. 38: 165-70), Microarray primer extension (O'Meara D, et al., 2002. Nucleic Acids Res. 30: e75), Tag arrays (Fan J B, et al., 2000. Genome Res. 10: 853-60), Template-directed incorporation (TDI) (Akula N, et al., 2002. Biotechniques. 32: 1072-8), fluorescence polarization (Hsu T M, et al., 2001. Biotechniques. 31: 560, 562, 564-8), Colorimetric oligonucleotide ligation assay (OLA, Nickerson D A, et al., 1990. Proc. Natl. Acad. Sci. USA. 87: 8923-7), Sequence-coded OLA (Gasparini P, et al., 1999. J. Med. Screen. 6: 67-9), Microarray ligation, Ligase chain reaction, Padlock probes, Rolling circle amplification, Invader assay (reviewed in Shi M M. 2001. Enabling large-scale pharmacogenetic studies by high-throughput mutation detection and genotyping technologies. Clin Chem. 47: 164-72), coded microspheres (Rao K V et al., 2003. Nucleic Acids Res. 31: e66) and MassArray (Leushner J, Chiu N H, 2000. Mol Diagn. 5: 341-80).

[0619] According to a presently preferred embodiment of the present invention the step of searching for any of the nucleic acid sequences described here, in tumor cells or in cells derived from a cancer patient is effected by any suitable technique, including, but not limited to, nucleic acid sequencing, polymerase chain reaction, ligase chain reaction, self-sustained synthetic reaction, Qβ-Replicase, cycling probe reaction, branched DNA, restriction fragment length polymorphism analysis, mismatch chemical cleavage, heteroduplex analysis, allele-specific oligonucleotides, denaturing gradient gel electrophoresis, constant denaturant gel electrophoresis, temperature gradient gel electrophoresis, dideoxy fingerprinting, Pyrosequencing™, Acycloprime™, and reverse dot blot.

[0620] Detection may also optionally be performed with a chip or other such device. The nucleic acid sample which includes the candidate region to be analyzed is preferably isolated, amplified and labeled with a reporter group. This reporter group can be a fluorescent group such as phycoerythrin. The labeled nucleic acid is then incubated with the probes immobilized on the chip using a fluidics station. For example, Manz et al. (1993) Adv in Chromatogr 1993; 33:1-66 describe the fabrication of fluidics devices and particularly microcapillary devices, in silicon and glass substrates.

[0621] Once the reaction is completed, the chip is inserted into a scanner and patterns of hybridization are detected. The hybridization data is collected, as a signal emitted from the reporter groups already incorporated into the nucleic acid, which is now bound to the probes attached to the chip. Since the sequence and position of each probe immobilized on the chip is known, the identity of the nucleic acid hybridized to a given probe can be determined.

[0622] Preferably, the detection of at least one nucleic acid change and/or the splice variant sequence of the present invention is effected in a biological sample containing RNA molecules using, for example, RT-PCR or in situ RT-PCR.

[0623] RT-PCR analysis: This method uses PCR amplification of relatively rare RNAs molecules. First, RNA molecules are purified from the cells and converted into complementary DNA (cDNA) using a reverse transcriptase enzyme (such as an MMLV-RT) and primers such as, oligo dT, random hexamers or gene specific primers. Then by applying gene specific primers and Taq DNA polymerase, a PCR amplification reaction is carried out in a PCR machine. Those of skills in the art are capable of selecting the length and sequence of the gene specific primers and the PCR conditions (i.e., annealing temperatures, number of cycles and the like) which are suitable for detecting specific RNA molecules. It will be appreciated that a semi-quantitative RT-PCR reaction can be employed by adjusting the number of PCR cycles and comparing the amplification product to known controls.

[0624] In situ RT-PCR stain: This method is described in Nuovo G J, et al. [Intracellular localization of polymerase chain reaction (PCR)-amplified hepatitis C cDNA. Am J Surg Pathol. 1993, 17: 683-90] and Komminoth P, et al. [Evaluation of methods for hepatitis C virus detection in archival liver biopsies. Comparison of histology, immunohistochemistry, in situ hybridization, reverse transcriptase polymerase chain reaction (RT-PCR) and in situ RT-PCR. Pathol Res Pract. 1994, 190: 1017-25]. Briefly, the RT-PCR reaction is performed on fixed cells by incorporating labeled nucleotides to the PCR reaction. The reaction is carried on using a specific in situ RT-PCR apparatus such as the laser-capture microdissection PixCell I LCM system available from Arcturus Engineering (Mountainview, Calif.).

[0625] It will be appreciated that when utilized along with automated equipment, the above described detection methods can be used to screen multiple samples for a disease and/or pathological condition both rapidly and easily.

[0626] Immunoassays

[0627] In another embodiment of the present invention, an immunoassay can be used to qualitatively or quantitatively detect and analyze markers in a sample. This method comprises: providing an antibody that specifically binds to a marker; contacting a sample with the antibody; and detecting the presence of a complex of the antibody bound to the marker in the sample.

[0628] To prepare an antibody that specifically binds to a marker, purified protein markers can be used. Antibodies that specifically bind to a protein marker can be prepared using any suitable methods known in the art.

[0629] After the antibody is provided, a marker can be detected and/or quantified using any of a number of well recognized immunological binding assays. Useful assays include, for example, an enzyme immune assay (EIA) such as enzyme-linked immunosorbent assay (ELISA), a radioimmune assay (RIA), a Western blot assay, or a slot blot assay see, e.g., U.S. Pat. Nos. 4,366,241; 4,376,110; 4,517,288; and 4,837,168). Generally, a sample obtained from a subject can be contacted with the antibody that specifically binds the marker.

[0630] Optionally, the antibody can be fixed to a solid support to facilitate washing and subsequent isolation of the complex, prior to contacting the antibody with a sample. Examples of solid supports include but are not limited to glass or plastic in the form of, e.g., a microtiter plate, a stick, a bead, or a microbead. Antibodies can also be attached to a solid support.

[0631] After incubating the sample with antibodies, the mixture is washed and the antibody-marker complex formed can be detected. This can be accomplished by incubating the washed mixture with a detection reagent. Alternatively, the marker in the sample can be detected using an indirect assay, wherein, for example, a second, labeled antibody is used to detect bound marker-specific antibody, and/or in a competition or inhibition assay wherein, for example, a monoclonal antibody which binds to a distinct epitope of the marker are incubated simultaneously with the mixture.

[0632] Throughout the assays, incubation and/or washing steps may be required after each combination of reagents. Incubation steps can vary from about 5 seconds to several hours, preferably from about 5 minutes to about 24 hours. However, the incubation time will depend upon the assay format, marker, volume of solution, concentrations and the like. Usually the assays will be carried out at ambient temperature, although they can be conducted over a range of temperatures, such as 10° C. to 40° C.

[0633] The immunoassay can be used to determine a test amount of a marker in a sample from a subject. First, a test amount of a marker in a sample can be detected using the immunoassay methods described above. If a marker is present in the sample, it will form an antibody-marker complex with an antibody that specifically binds the marker under suitable incubation conditions described above. The amount of an antibody-marker complex can optionally be determined by comparing to a standard. As noted above, the test amount of marker need not be measured in absolute units, as long as the unit of measurement can be compared to a control amount and/or signal.

[0634] Preferably used are antibodies which specifically interact with the polypeptides of the present invention and not with wild type proteins or other isoforms thereof, for example. Such antibodies are directed, for example, to the unique sequence portions of the polypeptide variants of the present invention, including but not limited to bridges, heads, tails and insertions described in greater detail below. Preferred embodiments of antibodies according to the present invention are described in greater detail with regard to the section entitled “Antibodies”.

[0635] Radio-immunoassay (RIA): In one version, this method involves precipitation of the desired substrate and in the methods detailed hereinbelow, with a specific antibody and radiolabelled antibody binding protein (e.g., protein A labeled with I¹²⁵) immobilized on a precipitable carrier such as agarose beads. The number of counts in the precipitated pellet is proportional to the amount of substrate.

[0636] In an alternate version of the RIA, a labeled substrate and an unlabelled antibody binding protein are employed. A sample containing an unknown amount of substrate is added in varying amounts. The decrease in precipitated counts from the labeled substrate is proportional to the amount of substrate in the added sample.

[0637] Enzyme linked immunosorbent assay (ELISA): This method involves fixation of a sample (e.g., fixed cells or a proteinaceous solution) containing a protein substrate to a surface such as a well of a microtiter plate. A substrate specific antibody coupled to an enzyme is applied and allowed to bind to the substrate. Presence of the antibody is then detected and quantitated by a colorimetric reaction employing the enzyme coupled to the antibody. Enzymes commonly employed in this method include horseradish peroxidase and alkaline phosphatase. If well calibrated and within the linear range of response, the amount of substrate present in the sample is proportional to the amount of color produced. A substrate standard is generally employed to improve quantitative accuracy.

[0638] Western blot: This method involves separation of a substrate from other protein by means of an acrylamide gel followed by transfer of the substrate to a membrane (e.g., nylon or PVDF). Presence of the substrate is then detected by antibodies specific to the substrate, which are in turn detected by antibody binding reagents. Antibody binding reagents may be, for example, protein A, or other antibodies. Antibody binding reagents may be radiolabelled or enzyme linked as described hereinabove. Detection may be by autoradiography, calorimetric reaction or chemiluminescence. This method allows both quantitation of an amount of substrate and determination of its identity by a relative position on the membrane which is indicative of a migration distance in the acrylamide gel during electrophoresis.

[0639] Immunohistochemical analysis: This method involves detection of a substrate in situ in fixed cells by substrate specific antibodies. The substrate specific antibodies may be enzyme linked or linked to fluorophores. Detection is by microscopy and subjective evaluation. If enzyme linked antibodies are employed, a colorimetric reaction may be required.

[0640] Fluorescence activated cell sorting (FACS): This method involves detection of a substrate in situ in cells by substrate specific antibodies. The substrate specific antibodies are linked to fluorophores. Detection is by means of a cell sorting machine which reads the wavelength of light emitted from each cell as it passes through a light beam. This method may employ two or more antibodies simultaneously.

[0641] Radio-Imaging Methods

[0642] These methods include but are not limited to, positron emission tomography (PET) single photon emission computed tomography (SPECT). Both of these techniques are non-invasive, and can be used to detect and/or measure a wide variety of tissue events and/or functions, such as detecting cancerous cells for example. Unlike PET, SPECT can optionally be used with two labels simultaneously. SPECT has some other advantages as well, for example with regard to cost and the types of labels that can be used. For example, U.S. Pat. No. 6,696,686 describes the use of SPECT for detection of breast cancer, and is hereby incorporated by reference as if fully set forth herein.

### EXAMPLE 24

[0643] The methodology undertaken to uncover the biomolecular sequences of the present invention includes the following as non-limiting examples only.

[0644] Human ESTs and cDNAs were obtained from GenBank versions 136 (Jun. 15, 2003 ftp.ncbi.nih.gov/genbank/release.notes/gb136.release.notes); NCBI genome assembly of April 2003; RefSeq sequences from June 2003; Genbank version 139 (December 2003); Human Genome from NCBI (Build 34) (from October 2003); and RefSeq sequences from December 2003; and from Incyte Corporation (Wilmington, Del., USA). With regard to GenBank sequences, the human EST sequences from the EST (GBEST) section and the human mRNA sequences from the primate (GBPRI) section were used; also the human nucleotide RefSeq mRNA sequences were used (see for example www.ncbi.nlm.nih.gov/Genbank/GenbankOverview.html and for a reference to the EST section, see www.ncbi.nlm.nih.gov/dbEST/; a general reference to dbEST, the EST database in GenBank, may be found in Boguski et al, Nat Genet. 1993 August; 4(4):332-3; all of which are hereby incorporated by reference as if fully set forth herein).

[0645] Novel splice variants were predicted using the LEADS clustering and assembly system as described in Sorek, R., Ast, G. & Graur, D. Alu-containing exons are alternatively spliced. Genome Res 12, 1060-7 (2002); U.S. Pat. No. 6,625,545; and U.S. patent application Ser. No. 10/426,002, published as US20040101876 on May 27, 2004; all of which are hereby incorporated by reference as if fully set forth herein. Briefly, the software cleans the expressed sequences from repeats, vectors and immunoglobulins. It then aligns the expressed sequences to the genome taking alternatively splicing into account and clusters overlapping expressed sequences into “clusters” that represent genes or partial genes.

[0646] These were annotated using the GeneCarta (Compugen, Tel-Aviv, Israel) platform. The GeneCarta platform includes a rich pool of annotations, sequence information (particularly of spliced sequences), chromosomal information, alignments, and additional information such as SNPs, gene ontology terms, expression profiles, functional analyses, detailed domain structures, known and predicted proteins and detailed homology reports.

[0647] EST libraries which included above-average levels of contamination, such as DNA contamination for example, were eliminated. The presence of such contamination was determined as follows. For each library, the number of unspliced ESTs that are not fully contained within other spliced sequences was counted. If the percentage of such sequences (as compared to all other sequences) was at least 4 standard deviations above the average for all libraries being analyzed, this library was tagged as being contaminated and was eliminated from further consideration in the below analysis (see also Sorek, R. & Safer, H. M. A novel algorithm for computational identification of contaminated EST libraries. Nucleic Acids Res 31, 1067-74 (2003) for further details).

### EXAMPLE 25

[0648] Various binding assays may optionally and preferably be used in order to determine the effect of the splice variants according to the present invention on calcium channel function and/or the effect of a therapeutic agent (such as a drug or drugs) on calcium channels having a splice variant according to the present invention. Preferably, these assays are performed with a known compound or compounds first, in order to establish the effect of the splice variant of the present invention. Such compounds are well known in the art and could easily be selected by one of ordinary skill in the art.

[0649] Methods for screening these compounds for their effects on calcium channel activity have also been disclosed (see for example, U.S. Pat. No. 6,096,514). In addition, some organic calcium channel blocking compounds have been described as being useful to treat stroke, cerebral ischemia, head trauma, or epilepsy involving calcium channel activity (see U.S. Pat. Nos. 6,294,533, 6,423,689). Therefore, a person skilled in the art can use methods known in the art, such as described in the references cited above, to screen for compounds that bind to, and in some cases functionally alter, a splice variant protein according to the present invention, or polypeptide fragments thereof.

[0650] Splice variants according to the present invention or fragments thereof can be used in binding studies to identify compounds binding to or interacting with splice variants or fragments thereof. In one embodiment, splice variants or fragments thereof can be used in binding studies, to identify compounds that: bind to or interact with splice variants as described herein; and bind to or interact with one or more other alpha 1 subunit isoforms and not with a splice variant according to the present invention. Such binding studies can be performed using different formats including competitive and non-competitive formats. Further competition studies can be carried out using additional compounds determined to bind to splice variants according to the present invention or other alpha 1 subunit isoforms.

[0651] The particular splice variant portions (amino acid sequences) involved in ligand binding can be identified by using labeled compounds that bind to the protein and different protein fragments. Different strategies can be employed to select fragments to be tested to narrow down the binding region. Examples of such strategies include testing consecutive fragments about 15 amino acids in length starting at the N-terminus, and testing longer length fragments. If longer length fragments are tested, a fragment binding to a compound can be subdivided to further locate the binding region. Fragments used for binding studies can be generated using recombinant nucleic acid techniques.

[0652] Binding assays can be performed using recombinantly produced splice variants polypeptides present in different environments. Such an environment may optionally be derived from cell portions or fragments, or other “natural” sources. Another exemplary environment is an artificial lipid bilayer into which the splice variant-containing calcium channel is inserted. Such technology is available for example from Nimbus Biotechnologie, Germany, which provides an assay for determining membrane affinity and pore forming properties of proteins/peptides by using solid supported lipid bilayers. This technology enables an ion channel to correct assemble and form a pore in a lipid bilayer which mimics the external membrane of a cell. This assay uses their TRANSIL® technology in a micro well plate (see for example Loidl-Stahlhofen et al., Solid-Supported Biomolecules on Modified Silica Surfaces: A Tool for Fast Physiocochemical Characterization and High-Throughput Screening. 2001, Adv. Mater. 13, 1829-1834). In this assay a calcium channel may optionally be incubated with a defined single lipid bilayer on a solid support. Unbound protein may optionally be removed by washing, for example. Pore formation is preferably measured by using ion sensitive fluorescence dyes on one side of the lipid bilayer; if the pore is successfully formed then migration of fluorescence is optionally and preferably measured by using a fluorescence spectrometer.

[0653] Alternatively, other functional assays may optionally be used to measure the activity of a calcium channel by methods known to those of skill in the art, including the electrophysiological methods (e.g., Williams et al., 1992 Science 257, 389-395; see also, for example, U.S. Pat. Nos. 6,353,091; 6,156,726; and 6,096,514).

[0654] For any of these assays, various compounds (such as DHP and/or toxins, as described above) may optionally be used in order to assess function of a calcium channel containing an alpha 1 subunit splice variant according to the present invention. Preferably, the effect of such compound(s) is compared to the effect on the known, WT protein.

### EXAMPLE 26

[0655] According to another embodiment of the present invention, there is provided a method to computationally identify novel mutually exclusive exons. According to this method, a group of known mutually exclusive events was collected and analyzed as described below. Preliminary results are also provided.

Materials and Methods

[0656] Creating a Dataset of Known Mutually Exclusive Exons Using the Leads Software.

[0657] For the classification of mutually exclusive exons the LEADS output obtained from NCBI GenBank version 136 (June 2003) was parsed. To define mutually exclusive events two distinct sequences (EST/RNA) that contain the same flanking upstream and downstream exons and two different exons between them were located. To find conserved events in the mouse sequence a LEADS-generated file of mouse ESTs that are mapped to the human chromosome was used. A conserved mouse exon should be mapped to the human chromosome in the same position as its parallel human exon. Thus, two mouse sequences that contain the same flanking exons and different exon between them with the same positions as the human mutually exclusive exons were located. Specific characteristics were found to be common to mutually exclusive exons. These features include a short intervening intron, certain conservation patterns, size identity between the two exons, and sequence identity between the exons (see “Preliminary Results”).

[0658] Finding potential novel exons. The input of this stage will be a set of 110,932 conserved internal human exons. Preliminary results show that mutually exclusive exons usually have the same length, or lengths that differ from each other by a multiple of 3, with a short intron between them. Therefore, optionally the method featuring taking 2000 nt from the intronic regions upstream and downstream to the common exon, and looking for canonical splice site boundaries that define a sequence with the same length as the common exon, or with a length that differs by a multiple of three bases. Matching sequences will be considered putative mutually exclusive partners. In addition, my preliminary results and other studies show that in some mutually exclusive events, the two exons have sequence similarity. Similarity is optionally examined by running the tBLASTx program to compare each putative novel exon against its common exon.

[0659] To find the protein translation frame it is possible to make an alignment between the sequence of the common exon and the sequence of the RNA that expresses it and calculate the translation frame according to the positions of the exon relative to the RNA and to the positions of the coding sequence (CDS). Then, the translation frame was used to search for stop codons in the putative novel exon and exons that cause protein truncation are preferably removed (see preliminary results).

[0660] FIG. 2 illustrates some of these points with regard to mutually exclusive exons in the CACNA1C gene. (a) Part of the CACNA1C gene (from UCSC genome browser, http://genome.ucsc.edu). Introns marked as thin lines and exons marked as boxes. Two distinct mRNAs present each of the mutually exclusive exons (marked as red arrows). The intron between the two exons is relatively small (b) Human-Mouse and Human-Rat alignment of the CACNA1C gene corresponding to RefSeq NM_{—}000719 (from vista browser, pipeline.lbl.gov). The X-axis presents the nucleotide coordinates on human chromosome 12, according to the assembly version of the human genome from July 2003. The Y-axis presents the level of conservation between the human genome and the corresponding mouse/rat genome. Blue bars above the conservation area correspond to annotated exons. Blue areas within the conservation graph mark exons; orange areas mark conserved non-exonic sequences. [1] The area marked with a bracket presents the mutually exclusive exons; the other one is constitutively spliced exon. [2] Expanded view of the mutually exclusive exons. The left “hill” presents one of the mutually exclusive exons and the right “hill” presents the other. Note the high conservation rate in the exonic and the flanking intronic regions. (c) Alignment of the two mutually exclusive exons using the tBLASTx program (Altschul, S. F., Madden, T. L., Schaffer, A. A., Zhang, J., Zhang, Z., Miller, W., and Lipman D. J., Gapped BLAST and PSI-BLAST: a new generation of protein database search programs. Nucleic Acids Res 1997; 25:3389-3402), showing sequence similarity.

[0661] Searching for the ‘putative novel exon’ in the mouse sequence. In this stage it is determined whether the putative mutually exclusive events are conserved in mouse. The input will be mouse exons, which are orthologs to the common human exons that have putative novel exons. Using BLASTn (31) the putative novel human exons in the introns flanking the common mouse exons are searched. A putative novel exon will be defined as ‘conserved’ only if it will pass a certain alignment threshold, and only if it will be flanked by canonical splice sites in the mouse genome.

[0662] RT-PCR. Experimental validation is carried out by RT-PCR on RNAs from a panel of tissues. For each putative mutually exclusive event two distinct reactions are used. For the first reaction oligonucleotide primers will be designed from the common exon and from a flanking exon. For the second reaction oligonucleotide primers will be designed from the novel exon and from the same flanking exon as in the first reaction.

Preliminary Results and Discussion

[0663] Mutually exclusive exon characteristics. The search for known mutually exclusive events resulted in 845 human mutually exclusive cases supported by ESTs. Of them, 22 were conserved in mouse. In this set the exons themselves were conserved, as well as their pattern of alternative splicing. As human EST data can be noisy, the mutually exclusive exons were characterized according to the 22 conserved events. I found that there were unique features that characterize these exons:
[0664] 1. The size of the two exons was frequently identical (12 out of 22 cases); If not identical, the difference was a multiple of 3 (8 out of 22).
[0665] 2. Mutually exclusive exons were shorter than constitutively spliced exons (average 90 nt, compared to average 129 nt, respectively).
[0666] 3. The intron that separates the two exons was smaller than usual (average 1500 with median 820, compared to average 3000 and median 2000 of regular introns).
[0667] 4. No stop codon was found in frame of both exons.
[0668] 5. Sequences of the two exons were frequently similar by their protein sequence (11/22 cases, using tBLASTx). 3/22 of the cases showed significant similarity in their nucleotide sequence.
[0669] 6. Both exons were more conserved in mouse than constitutively spliced exons (average 96% and 89% (16) sequence identity, respectively).
[0670] 7. In addition to the exonic conservation, both exons were flanked by conserved intronic sequences (averaging 100 bases from each side of each exon). This occurred in 19/22 cases.

[0671] The differences found probably stem from the special behavior of mutually exclusive exons. The short intron might be needed to cause steric interference that underlies the mutually exclusive splicing mechanism. In addition, since these exons are never incorporated into the same transcript, but they are switched with each other, the difference between their sizes should be a multiple of 3 in order to preserve the frame and prevent protein truncation.

[0672] Sequence similarity between mutually exclusive exons was demonstrated in the literature for some mutually exclusive events, and is attributed to ‘tandem exon duplication’ evolutionary events that give rise to mutually exclusive alternative splicing.

[0673] Exonic and intronic high conservation patterns were observed also for non-mutually exclusive alternative exons, and are attributed to sequences that regulate alternative splicing.

[0674] 6.2 Potential novel exon dataset. Out of the 110,932 conserved common exons, 36,724 were found to have putative sequences that are flanked by canonical splice sites and are of a length that is equal to their common exon, or are different by a multiple of 3. On average, there were 100 putative sequences for each common exon, and the total number of putative sequences was 3,619,887. This set was the initial set of low-reliability novel exons, which was further screened for higher reliability candidates.

[0675] The first filter was human-mouse conservation filter. In order to localize a putative novel human exon on the mouse intronic region, the BLASTn program was used. 2245 (out of 36,724) common exons were found to have putative novel exons that are conserved in mouse with average identity level of 91.24%. Since exons are defined by canonical splice sites, all putative novel exons for which the mouse ortholog exon lacked such sites were excluded. After this selection, 1209 (out of 2245) common exons having putative novel exons with higher conservation identity level of 92.23% remained. Since the average conservation level of mutually exclusive exons in the training set was 96% (comparing to 89% in constitutive exons), the increasing conservation rate indicated enrichment in true novel exons.

[0676] As the next stage of the screening, human-mouse conservation in the upstream and/or downstream flanking intronic regions of both the common and the novel exons was required as a filter. It was found that 654 (out of 1209) common exons were conserved in their flanking regions and their novel exons were conserved in their flanking intronic regions too. These novel exons were conserved in mouse to a level of 93.77%, (indicating again on increasing enrichment of true novel exons).

[0677] None of the exons in the known conserved mutually exclusive set created a stop codon in the protein sequence. According to that criterion, novel exons that contained an in-frame stop codon were excluded. This resulted in a set of 119 common exons that have putative novel exon (conservation level of 94.25%)

[0678] In cases where the borders of the novel exon were not clear (several options were present), correct borders were selected according to various criteria such as: (i) there is minimal difference between the novel human exon size and the size of the novel mouse exon. (ii) the novel exon had maximal identity percentage when aligned to the mouse orthologous sequence. (iii) novel exons with the minimal difference between the common exon size and the size of the novel exon.

[0679] As written above, one of the features that distinguished mutually exclusive exons was sequence similarity between the two exons. To identify sequence similarity between common and novel exons the tBLASTx program was run with expectation value of 0.02. Only 917 out of 36,724 (2.5%) common exons were found to be similar by their protein sequence to their putative novel exons.

[0680] Final set characteristics. The final set contains 119 common and novel exons (FIG. 3). The average intron length of this set is 559.6. This is a relatively short intron, and that strengthens the possibility of mutually exclusive manner. The novel exons are conserved in mouse to a level of 94.25%, slightly less than the 96% average identity level measured in the training set. In addition, about ˜70 nt in the upstream and/or downstream intronic regions adjacent to the novel exon are conserved in mouse with average identity level of 78%. These results indicate that many of the exons in this set might be truly novel human mutually exclusive exons.

[0681] It is appreciated that certain features of the invention, which are, for clarity, described in the context of separate embodiments, may also be provided in combination in a single embodiment. Conversely, various features of the invention, which are, for brevity, described in the context of a single embodiment, may also be provided separately or in any suitable subcombination.

[0682] Although the invention has been described in conjunction with specific embodiments thereof, it is evident that many alternatives, modifications and variations will be apparent to those skilled in the art. Accordingly, it is intended to embrace all such alternatives, modifications and variations that fall within the spirit and broad scope of the appended claims. All publications, patents and patent applications mentioned in this specification are herein incorporated in their entirety by reference into the specification, to the same extent as if each individual publication, patent or patent application was specifically and individually indicated to be incorporated herein by reference. In addition, citation or identification of any reference in this application shall not be construed as an admission that such reference is available as prior art to the present invention.

The application's sequence listing, which the Patent Office published only in electronic form, follows.

SEQUENCE LISTING (191 sequences)

SEQ ID NO: 1 - protein, 2347 aa, Homo sapiens
MTEGARAADEVRVPLGAPPPGPAALVGASPESPGAPGREAERGSELGVSPSESPAAERGAELGADEEQRVPYPALAATVFFCLGQTTRPRSWCLRLVCNPWFEHVSMLVIMLNCVTLGMFRPCEDVECGSERCNILEAFDAFIFAFFAVEMVIKMVALGLFGQKCYLGDTWNRLDFFIVVAGMMEYSLDGHNVSLSAIRTVRVLRPLRAINRVPSMRILVTLLLDTLPMLGNVLLLCFFVFFIFGIVGVQLWAGLLRNRCFLDSAFVRNNNLTFLRPYYQTEEGEENPFICSSRRDNGMQKCSHIPGRRELRMPCTLGWEAYTQPQAEGVGAARNACINWNQYYNVCRSGDSNPHNGAINFDNIGYAWIAIFQVITLEGWVDIMYYVMDAHSFYNFIYFILLIIVGSFFMINLCLVVIATQFSETKQRESQLMREQRARHLSNDSTLASFSEPGSCYEELLKYVGHIFRKVKRRSLRLYARWQSRWRKKVDPSAVQGQGPGHRQRRAGRHTASVHHLVYHHHHHHHHHYHFSHGSPRRPGPEPGACDTRLVRAGAPPSPPSPGRGPPDAESVHSIYHADCHIEGPQERARVAHAAATAAASLRLATGLGTMNYPTILPSGVGSGKGSTSPGPKGKWAGGPPGTGGHGPLSLNSPDPYEKIPHVVGEHGLGQAPGHLSGLSVPCPLPSPPAGTLTCELKSCPYCTRALEDPEGELSGSESGDSDGRGVYEFTQDVRHGDRWDPTRPPRATDTPGPGPGSPQRRAQQRAAPGEPGWMGRLWVTFSGKLRRIVDSKYFSRGIMMAILVNTLSMGVEYHEQPEELTNALEISNIVFTSMFALEMLLKLLACGPLGYIRNPYNIFDGIIVVISVWEIVGQADGGLSVLRTFRLLRVLKLVRFLPALRRQLVVLVKTMDNVATFCTLLMLFIFIFSILGMHLFGCKFSLKTDTGDTVPDRKNFDSLLWAIVTVFQILTQEDWNVVLYNGMASTSSWAALYFVALMTFGNYVLFNLLVAILVEGFQAEGDANRSDTDEDKTSVHFEEDFHKLRELQTTELKMCSLAVTPNGHLEGRGSLSPPLIMCTAATPMPTPKSSPFLDAAPSLPDSRRGSSSSGDPPLGDQKPPASLRSSPCAPWGPSGAWSSRRSSWSSLGRAPSLKRRGQCGERESLLSGEGKGSTDDEAEDGRAAPGPRATPLRRAESLDPRPLRPAALPPTKCRDRDGQVVALPSDFFLRIDSHREDAAELDDDSEDSCCLRLHKVLEPYKPQWCRSREAWALYLFSPQNRFRVSCQKVITHKMFDHVVLVFIFLNCVTIALERPDIDPGSTERVFLSVSNYIFTAIFVAEMMVKVVALGLLSGEHAYLQSSWNLLDGLLVLVSLVDIVVAMASAGGAKILGVLRVLRLLRTLRPLRVISRAPGLKLVVETLISSLRPIGNIVLICCAFFIIFGILGVQLFKGKFYYCEGPDTRNISTKAQCRAAHYRWVRRKYNFDNLGQALMSLFVLSSKDGWVNIMYDGLDAVGVDQQPVQNHNPWMLLYFISFLLIVSFFVLNMFVGVVVENFHKCRQHQEAEEARRREEKRLRRLERRRRKAQRRPYYADYSPTRRSIHSLCTSHYLDLFITFIICVNVITMSMEHYNQPKSLDEALKYCNYVFTIVFVFEAALKLVAFGFRRFFKDRWNQLDLAIVLLSLMGITLEEIEMSAALPINPTIIRIMRVLRIARVLKLLKMATGMRALLDTVVQALPQVGNLGLLFMLLFFIYAALGVELFGRLECSEDNPCEGLSRHATFSNFGMAFLTLFRVSTGDNWNGIMKDTLRECSREDKHCLSYLPALSPVYFVTFVLVAQFVLVNVVVAVLMKHLEESNKEAREDAELDAEIELEMAQGPGSARRVDADRPPLPQESPGARDAPNLVARKVSVSRMLSLPNDSYMFRPVVPASAPHPRPLQEVEMETYGAGTPLGSVASVHSPPAESCASLQIPLAVSSPARSGEPLHALSPRGTARSPSLSRLLCRQEAVHTDSLEGKIDSPRDTLDPAEPGEKTPVRPVTQGGSLQSPPRSPRPASVRTRKHTFGQRCVSSRPAAPGGEEAEASDPADEEVSHITSSACPWQPTAEPHGPEASPVAGGERDLRRLYSVDAQGFLDKPGRADEQWRPSAELGSGEPGEAKAWGPEAEPALGARRKKKMSPPCISVEPPAEDEGSARPSAAEGGSTTLRRRTPSCEATPHRDSLEPTEGSGAGGDPAAKGERWGQASCRAEHLTVPSFAFEPLDLGVPSGDPFLDGSHSVTPESRASSSGAIVPLEPPESEPPMPVGDPPEKRRGLYLTVPQCPLEKPGSPSATPAPGGGADDPV

SEQ ID NO: 2 - protein, 1414 aa, Homo sapiens
MHLFGCKFSLKTDTGDTVPDRKNFDSLLWAIVTVFQILTQEDWNVVLYNGMASTSSWAALYFVALMTFGNYVLFNLLVAILVEGFQAEGDANRSDTDEDKTSVHFEEDFHKLRELQTTELKMCSLAVTPNGHLEGRGSLSPPLIMCTAATPMPTPKSSPFLDAAPSLPDSRRGSSSSGDPPLGDQKPPASLRSSPCAPWGPSGAWSSRRSSWSSLGRAPSLKRRGQCGERESLLSGEGKGSTDDEAEDGRAAPGPRATPLRRAESLDPRPLRPAALPPTKCRDRDGQVVALPSDFFLRIDSHREDAAELDDDSEDSCCLRLHKVLEPYKPQWCRSREAWALYLFSPQNRFRVSCQKVITHKMFDHVVLVFIFLNCVTIALERPDIDPGSTERVFLSVSNYIFTAIFVAEMMVKVVALGLLSGEHAYLQSSWNLLDGLLVLVSLVDIVVAMASAGGAKILGVLRVLRLLRTLRPLRVISRAPGLKLVVETLISSLRPIGNIVLICCAFFIIFGILGVQLFKGKFYYCEGPDTRNISTKAQCRAAHYRWVRRKYNFDNLGQALMSLFVLSSKDGWVNIMYDGLDAVGVDQQPVQNHNPWMLLYFISFLLIVSFFVLNMFVGVVVENFHKCRQHQEAEEARRREEKRLRRLERRRRKAQRRPYYADYSPTRRSIHSLCTSHYLDLFITFIICVNVITMSMEHYNQPKSLDEALKYCNYVFTIVFVFEAALKLVAFGFRRFFKDRWNQLDLAIVLLSLMGITLEEIEMSAALPINPTIIRIMRVLRIARVLKLLKMATGMRALLDTVVQALPQVGNLGLLFMLLFFIYAALGVELFGRLECSEDNPCEGLSRHATFSNFGMAFLTLFRVSTGDNWNGIMKDTLRECSREDKHCLSYLPALSPVYFVTFVLVAQFVLVNVVVAVLMKHLEESNKEAREDAELDAEIELEMAQGPGSARRVDADRPPLPQESPGARDAPNLVARKVSVSRMLSLPNDSYMFRPVVPASAPHPRPLQEVEMETYGAGTPLGSVASVHSPPAESCASLQIPLAVSSPARSGEPLHALSPRGTARSPSLSRLLCRQEAVHTDSLEGKIDSPRDTLDPAEPGEKTPVRPVTQGGSLQSPPRSPRPASVRTRKHTFGQRCVSSRPAAPGGEEAEASDPADEEVSHITSSACPWQPTAEPHGPEASPVAGGERDLRRLYSVDAQGFLDKPGRADEQWRPSAELGSGEPGEAKAWGPEAEPALGARRKKKMSPPCISVEPPAEDEGSARPSAAEGGSTTLRRRTPSCEATPHRDSLEPTEGSGAGGDPAAKGERWGQASCRAEHLTVPSFAFEPLDLGVPSGDPFLDGSHSVTPESRASSSGAIVPLEPPESEPPMPVGDPPEKRRGLYLTVPQCPLEKPGSPSATPAPGGGADDPV

SEQ ID NO: 3 - protein, 287 aa, Homo sapiens
MTEGARAADEVRVPLGAPPPGPAALVGASPESPGAPGREAERGSELGVSPSESPAAERGAELGADEEQRVPYPALAATVFFCLGQTTRPRSWCLRLVCNPWFEHVSMLVIMLNCVTLGMFRPCEDVECGSERCNILEAFDAFIFAFFAVEMVIKMVALGLFGQKCYLGDTWNRLDFFIVVAGMMEYSLDGHNVSLSAIRTVRVLRPLRAINRVPSMRILVTLLLDTLPMLGNVLLLCFFVFFIFGIVGVQLWAGLLRNRCFLDSAFVRCPGPTPVRPLPRWPCPPCR

SEQ ID NO: 4 - protein, 989 aa, Homo sapiens
MVNENTRMYIPEENHQGSNYGSPRPAHANMNANAAAGLAPEHIPTPGAALSWQAAIDAARQAKLMGSAGNATISTVSSTQRKRQQYGKPKKQGSTTATRPPRALLCLTLKNPIRRACISIVEWKPFEIIILLTIFANCVALAIYIPFPEDDSNATNSNLERVEYLFLIIFTVEAFLKVIAYGLLFHPNAYLRNGWNLLDFIIVVVGLFSAILEQATKADGANALGGKGAGFDVKALRAFRVLRPLRLVSGVPSLQVVLNSIIKAMVPLLHIALLVLFVIIIYAIIGLELFMGKMHKTCYNQEGIADVPAEDDPSPCALETGHGRQCQNGTVCKPGWDGPKHGITNFDNFAFAMLTVFQCITMEGWTDVLYWVNDAVGRDWPWIYFVTLIIIGSFFVLNLVLGVLSGEFSKEREKAKARGDFQKLREKQQLEEDLKGYLDWITQAEDIDPENEDEGMDEEKPRNRGTPAGMLDQKKGKFAWFSHSTETHVSMPTSETESVNTENVAGGDIEGENCGARLAHRISKSKFSRYWRRWNRFCRRKCRAAVKSNVFYWLVIFLVFLNTLTIASEHYNQPNWLTEVQDTANKALLALFTAEMLLKMYSLGLQAYFVSLFNRFDCFVVCGGILETILVETKIMSPLGISVLRCVRLLRIFKITRYWNSLSNLVASLLNSVRSIASLLLLLFLFIIIFSLLGMQLFGGKFNFDEMQTRRSTFDNFPQSLLTVFQILTGEDWNSVMYDGIMAYGGPSFPGMLVCIYFIILFICGNYILLNVFLAIAVDNLADAESLTSAQKEEEEEKERKKLARTASPEKKQELVEKPAVGESKEEKIELKSITADGESPPATKINMDDLQPNENEDKSPYPNPETTGEEDEEEPEMPVGPRPRPLSELHLKEKAVPMPEASAFFIFSSNNRFRLQCHRIVNDTIFTNLILFFILLSSISLAAEDPVQHTSFRNHVCIACVFCTPSPWGCARPTASVADIIVQSGAQF

SEQ ID NO: 5 - protein, 2169 aa, Homo sapiens [sequence omitted]

SEQ ID NO: 6 - protein, 206 aa, Homo sapiens
MVNENTRMYIPEENHQGSNYGSPRPAHANMNANAAAGLAPEHIPTPGAALSWQAAIDAARQAKLMGSAGNATISTVSSTQRKRQQYGKPKKQGSTTATRPPRALLCLTLKNPIRRACISIVEWKPFEIIILLTIFANCVALAIYIPFPEDDSNATNSNLERVEYLFLIIFTVEAFLKVIAYGLLFHPNAYLRNGWNLLDFIIVVVG

SEQ ID NO: 7 - protein, 406 aa, Homo sapiens
MVNENTRMYIPEENHQGSNYGSPRPAHANMNANAAAGLAPEHIPTPGAALSWQAAIDAARQAKLMGSAGNATISTVSSTQRKRQQYGKPKKQGSTTATRPPRALLCLTLKNPIRRACISIVEWKPFEIIILLTIFANCVALAIYIPFPEDDSNATNSNLERVEYLFLIIFTVEAFLKVIAYGLLFHPNAYLRNGWNLLDFIIVVVGLFSAILEQATKADGANALGGKGAGFDVKALRAFRVLRPLRLVSGVPSLQVVLNSIIKAMVPLLHIALLVLFVIIIYAIIGLELFMGKMHKTCYNQEGIADVPAEDDPSPCALETGHGRQCQNGTVCKPGWDGPKHGITNFDNFAFAMLTVFQCITMEGWTDVLYWVNDAVGRDWPWIYFVTLIIIGSFFVLNLVLGVLSG

SEQ ID NO: 8 - protein, 2182 aa, Homo sapiens
MVNENTRMYIPEENHQGSNYGSPRPAHANMNANAAAGLAPEHIPTPGAALSWQAAIDAARQAKLMGSAGNATISTVSSTQRKRQQYGKPKKQGSTTATRPPRALLCLTLKNPIRRACISIVEWKPFEIIILLTIFANCVALAIYIPFPEDDSNATNSNLERVEYLFLIIFTVEAFLKVIAYGLLFHPNAYLRNGWNLLDFIIVVVGLFSAILEQATKADGANALGGKGAGFDVKALRAFRVLRPLRLVSGVPSLQVVLNSIIKAMVPLLHIALLVLFVIIIYAIIGLELFMGKMHKTCYNQEGIADVPAEDDPSPCALETGHGRQCQNGTVCKPGWDGPKHGITNFDNFAFAMLTVFQCITMEGWTDVLYWVNDAVGRDWPWIYFVTLIIIGSFFVLNLVLGVLSGEFSKEREKAKARGDFQKLREKQQLEEDLKGYLDWITQAEDIDPENEDEGMDEEKPRNRGTPAGMLDQKKGKFAWFSHSTETHVSMPTSETESVNTENVAGGDIEGENCGARLAHRISKSKFSRYWRRWNRFCRRKCRAAVKSNVFYWLVIFLVFLNTLTIASEHYNQPNWLTEVQDTANKALLALFTAEMLLKMYSLGLQAYFVSLFNRFDCFVVCGGILETILVETKIMSPLGISVLRCVRLLRIFKITRYWNSLSNLVASLLNSVRSIASLLLLLFLFIIIFSLLGMQLFGGKFNFDEMQTRRSTFDNFPQSLLTVFQILTGEDWNSVMYDGIMAYGGPSFPGMLVCIYFIILFICGNYILLNVFLAIAVDNLADAESLTSAQKEEEEEKERKKLARTASPEKKQELVEKPAVGESKEEKIELKSITADGESPPATKINMDDLQPNENEDKSPYPNPETTGEEDEEEPEMPVGPRPRPLSELHLKEKAVPMPEASAFFIFSSNNRFRLQCHRIVNDTIFTNLILFFILLSSISLAAEDPVQHTSFRNHILFYFDIVFTTIFTIEIALKMTAYGAFLHKGSFCRNYFNILDLLVVSVSLISFGIQSSAINVVKILRVLRVLRPLRAINRAKGLKHVVQCVFVAIRTIGNIVIVTTLLQFMFACIGVQLFKGKLYTCSDSSKQTEAECKGNYITYKDGEVDHPIIQPRSWENSKFDFDNVLAAMMALFTVSTFEGWPELLYRSIDSHTEDKGPIYNYRVEISIFFIIYIIIIAFFMMNIFVGFVIVTFQEQGEQEYKNCELDKNQRQCVEYALKARPLRRYIPKNQHQYKVWYVVNSTYFEYLMFVLILLNTICLAMQHYGQSCLFKIAMNILNMLFTGLFTVEMILKLIAFKPKHYFCDAWNTFDALIVVGSIVDIAITEVNPAEHTQCSPSMNAEENSRISITFFRLFRVMRLVKLLSRGEGIRTLLWTFIKSFQALPYVALLIVMLFFIYAVIGMQVFGKIALNDTTEINRNNNFQTFPQAVLLLFRCATGEAWQDIMLACMPGKKCAPESEPSNSTEGETPCGSSFAVFYFISFYMLCAFLIINLFVAVIMDNFDYLTRDWSILGPHHLDEFKRIWAEYDPEAKGRIKHLDVVTLLRRIQPPLGFGKLCPHRVACKRLVSMNMPLNSDGTVMFNATLFALVRTALRIKTEEGPSPSEAHQGAEDPFRPAGNLEQANEELRAIIKKIWKRTSMKLLDQVVPPAGDDEVTVGKFYATFLIQEYFRKFKKRKEQGLVGKPSQRNALSLQAGLRTLHDIGPEIRRAISGDLTAEEELDKAMKEAVSAASEDDIFRRAGGLFGNHVSYYQSDGRSAFPQTFTTQRPLHINKAGSSQGDTESPSHEKLVDSTFTPSSYSSTGSNANINNANNTALGRLPRPAGYPSTVSTVEGHGPPLSPAIRVQEVAWKLSSNRCHSRESQAAMAGQEETSQDETYEVKMNHDTEACSEPSLLSTEMLSYQDDENRQLTLPEEDKRDIRQSPKRGFLRSASLGRRASFHLECLKRQKDRGGDISQKTVLPLHLVHHQALAVAGLSPLLQRSHSPASFPRPFATPPATPGSRGWPPQPVPTLRLEGVESSEKLNSSFPSIHCGSWAETTPGGGGSSAARRVRPVSLMVPSQAGAPGRQFHGSASSLVEAVLISEGLGQFAQDPKFIEVTTQELADACDMTIEEMESAADNILSGGAPQSPNGALLPFVNCRDAGQDRAGGEEDAGCVRARGAPSEEELQDSRVYVSSL

SEQ ID NO: 9 - protein, 2105 aa, Homo sapiens
MVNENTRMYIPEENHQGSNYGSPRPAHANMNANAAAGLAPEHIPTPGAALSWQAAIDAARQAKLMGSAGNATISTVSSTQRKRQQYGKPKKQGSTTATRPPRALLCLTLKNPIRRACISIVEWKPFEIIILLTIFANCVALAIYIPFPEDDSNATNSNLERVEYLFLIIFTVEAFLKVIAYGLLFHPNAYLRNGWNLLDFIIVVVGLFSAILEQATKADGANALGGKGAGFDVKALRAFRVLRPLRLVSGVPSLQVVLNSIIKAMVPLLHIALLVLFVIIIYAIIGLELFMGKMHKTCYNQEGIADVPAEDDPSPCALETGHGRQCQNGTVCKPGWDGPKHGITNFDNFAFAMLTVFQCITMEGWTDVLYWVNDAVGRDWPWIYFVTLIIIGSFFVLNLVLGVLSGEFSKEREKAKARGDFQKLREKQQLEEDLKGYLDWITQAEDIDPENEDEGMDEEKPRNRGTPAGMLDQKKGKFAWFSHSTETHVSMPTSETESVNTENVAGGDIEGENCGARLAHRISKSKFSRYWRRWNRFCRRKCRAAVKSNVFYWLVIFLVFLNTLTIASEHYNQPNWLTEVQDTANKALLALFTAEMLLKMYSLGLQAYFVSLFNRFDCFVVCGGILETILVETKIMSPLGISVLRCVRLLRIFKITRYWNSLSNLVASLLNSVRSIASLLLLLFLFIIIFSLLGMQLFGGKFNFDEMQTRRSTFDNFPQSLLTVFQILTGEDWNSVMYDGIMAYGGPSFPGMLVCIYFIILFICGNYILLNVFLAIAVDNLADAESLTSAQKEEEEEKERKKLARTASPEKKQELVEKPAVGESKEEKIELKSITADGESPPATKINMDDLQPNENEDKSPYPNPETTGEEDEEEPEMPVGPRPRPLSELHLKEKAVPMPEASAFFIFSSNNRFRLQCHRIVNDTIFTNLILFFILLSSISLAAEDPVQHTSFRNHILFYFDIVFTTIFTIEIALKMTAYGAFLHKGSFCRNYFNILDLLVVSVSLISFGIQSSAINVVKILRVLRVLRPLRAINRAKGLKHVVQCVFVAIRTIGNIVIVTTLLQFMFACIGVQLFKGKLYTCSDSSKQTEAECKGNYITYKDGEVDHPIIQPRSWENSKFDFDNVLAAMMALFTVSTFEGWPELLYRSIDSHTEDKGPIYNYRVEISIFFIIYIIIIAFFMMNIFVGFVIVTFQEQGEQEYKNCELDKNQRQCVEYALKARPLRRYIPKNQHQYKVWYVVNSTYFEYLMFVLILLNTICLAMQHYGQSCLFKIAMNILNMLFTGLFTVEMILKLIAFKPKHYFCDAWNTFDALIVVGSIVDIAITEVNPAEHTQCSPSMNAEENSRISITFFRLFRVMRLVKLLSRGEGIRTLLWTFIKSFQALPYVALLIVMLFFIYAVIGMQVFGKIALNDTTEINRNNNFQTFPQAVLLLFRCATGEAWQDIMLACMPGKKCAPESEPSNSTEGETPCGSSFAVFYFISFYMLCAFLIINLFVAVIMDNFDYLTRDWSILGPHHLDEFKRIWAEYDPEAKGRIKHLDVVTLLRRIQPPLGFGKLCPHRVACKRLVSMNMPLNSDGTVMFNATLFALVRTALRIKTEEGPSPSEAHQGAEDPFRPAGNLEQANEELRAIIKKIWKRTSMKLLDQVVPPAGDDEVTVGKFYATFLIQEYFRKFKKRKEQGLVGKPSQRNALSLQAGLRTLHDIGPEIRRAISGDLTAEEELDKAMKEAVSAASEDDIFRRAGGLFGNHVSYYQSDGRSAFPQTFTTQRPLHINKAGSSQGDTESPSHEKLVDSTFTPSSYSSTGSNANINNANNTALGRLPRPAGYPSTVSTVEGHGPPLSPAIRVQEVAWKLSSNRCHSRESQAAMAGQEETSQDETYEVKMNHDTEACSEPSLLSTEMLSYQDDENRQLTLPEEDKRDIRQSPKRGFLRSASLGRRASFHLECLKRQKDRGGDISQKTVLPLHLVHHQALAVAGLSPLLQRSHSPASFPRPFATPPATPGSRGWPPQPVPTLRLEGVESSEKLNSSFPSIHCGSWAETTPGGGGSSAARRVRPVSLMVPSQAGAPGRQFHGSASSLVEAVGDSQMGRGERPRATRGLGMRG

SEQ ID NO: 10 - protein, 1580 aa, Homo sapiens
MSSWPTRPTKSTAPPRPGGKNGTTIIANCIVLALEQHLPDDDKTPMSERLDDTEPYFIGIFCFEAGIKIIALGFAFHKGSYLRNGWNVMDFVVVLTGILATVGTEFDLRTLRAVRVLRPLKLVSGIPSLQVVLKSIMKAMIPLLQIGLLLFFAILIFAIIGLEFYMGKFHTTCFEEGTDDIQGESPAPCGTEEPARTCPNGTKCQPYWEGPNNGITQFDNILFAVLTVFQCITMEGWTDLLYNSNDASGNTWNWLYFIPLIIIGSFFMLNLVLGVLSGEFAKERERVENRRAFLKLRRQQQIERELNGYMEWISKAEEVILAEDETDGEQRHPFDGALRRTTIKKSKTDLLNPEEAEDQLADIASVGSPFARASIKSAKLENSTFFHKKERRMRFYIRRMVKTQAFYWTVLSLVALNTLCVAIVHYNQPEWLSDFLYYAEFIFLGLFMSEMFIKMYGLGTRPYFHSSFNCFDCGVIIGSIFEVIWAVIKPGTSFGISVLRALRLLRIFKVTKYWASLRNLVVSLLNSMKSIISLLFLLFLFIVVFALLGMQLFGGQFNFDEGTPPTNFDTFPAAIMTVFQILTGEDWNEVMYDGIKSQGGVQGGMVFSIYFIVLTLFGNYTLLNVFLAIAVDNLANAQELTKDEQEEEEAANQKLALQKAKEVAEVSPLSAANMSIAVKEQQKNQKPAKSVWEQRTSEMRKQNLLASREALYNEMDPDERWKAAYTRHLRPDMKTHLDRPLVVDPQENRNNNTNKSRAAEPTVDQRLGQQRAEDFLRKQARYHDRARDPSGSAGLDARRPWAGSQEAELSREGPYGRESDHHAREGSLEQPGFWEGEAERGKAGDPHRRHVHRQGGSRESRSGSPRTGADGEHRRHRAHRRPGEEGPEDKAERRARHREGSRPARGGEGEGEGPDGGERRRRHRHGAPATYEGDARREDKERRHRRRKENQGSGVPVSGPNLSTTRPIQQDLGRQDPPLAEDIDNMKNNKLATAESAAPHGSLGHAGLPQSPAKMGNSTDPGPMLAIPAMATNPQNAASRRTPNNPGNPSNPGPPKTPENSLIVTNPSGTQTNSAKTARKPDHTTVDIPPACPPPLNHTVVQVNKNANPDPLPKKEEEKKEEEEDDRGEDGPKPMPPYSSMFILSTTNPLRRLCHYILNLRYFEMCILMVIAMSSIALAAEDPVQPNAPRNNVLRYFDYVFTGVFTFEMVIKMIDLGLVLHQGAYFRDLWNILDFIVVSGALVAFAFTGNSKGKDINTIKSLRVLRVLRPLKTIKRLPKLKAVFDCVVNSLKNVFNILIVYMLFMFIFAVVAVQLFKGKFFHCTDESKEFEKDCRGKYLLYEKNEVKARDREWKKYEFHYDNVLWALLTLFTVSTGEGWPQVLKHSVDATFENQGPSPGYRMEMSIFYVVYFVVFPFFFVNIFVALIIITFQEQGDKMMEEYSLEKNERACIDFAISAKPLTRHMPQNKQSFQYRMWQFVVSPPFEYTIMAMIALNTIVLMMKFYGASVAYENALRVFNIVFTSLFSLECVLKVMAFGILNYFRDAWNIFDFVTVLGSITDILVTEFGAWSRATPPSPRS

SEQ ID NO: 11 - protein, 2523 aa, Homo sapiens
MSSWPTRPTKSTAPPRPGGKNGTTIIANCIVLALEQHLPDDDKTPMSERLDDTEPYFIGIFCFEAGIKIIALGFAFHKGSYLRNGWNVMDFVVVLTGILATVGTEFDLRTLRAVRVLRPLKLVSGIPSLQVVLKSIMKAMIPLLQIGLLLFFAILIFAIIGLEFYMGKFHTTCFEEGTDDIQGESPAPCGTEEPARTCPNGTKCQPYWEGPNNGITQFDNILFAVLTVFQCITMEGWTDLLYNSNDASGNTWNWLYFIPLIIIGSFFMLNLVLGVLSGEFAKERERVENRRAFLKLRRQQQIERELNGYMEWISKAEEVILAEDETDGEQRHPFDGALRRTTIKKSKTDLLNPEEAEDQLADIASVGSPFARASIKSAKLENSTFFHKKERRMRFYIRRMVKTQAFYWTVLSLVALNTLCVAIVHYNQPEWLSDFLYYAEFIFLGLFMSEMFIKMYGLGTRPYFHSSFNCFDCGVIIGSIFEVIWAVIKPGTSFGISVLRALRLLRIFKVTKYWASLRNLVVSLLNSMKSIISLLFLLFLFIVVFALLGMQLFGGQFNFDEGTPPTNFDTFPAAIMTVFQILTGEDWNEVMYDGIKSQGGVQGGMVFSIYFIVLTLFGNYTLLNVFLAIAVDNLANAQELTKDEQEEEEAANQKLALQKAKEVAEVSPLSAANMSIAVKEQQKNQKPAKSVWEQRTSEMRKQNLLASREALYNEMDPDERWKAAYTRHLRPDMKTHLDRPLVVDPQENRNNNTNKSRAAEPTVDQRLGQQRAEDFLRKQARYHDRARDPSGSAGLDARRPWAGSQEAELSREGPYGRESDHHAREGSLEQPGFWEGEAERGKAGDPHRRHVHRQGGSRESRSGSPRTGADGEHRRHRAHRRPGEEGPEDKAERRARHREGSRPARGGEGEGEGPDGGERRRRHRHGAPATYEGDARREDKERRHRRRKENQGSGVPVSGPNLSTTRPIQQDLGRQDPPLAEDIDNMKNNKLATAESAAPHGSLGHAGLPQSPAKMGNSTDPGPMLAIPAMATNPQNAASRRTPNNPGNPSNPGPPKTPENSLIVTNPSGTQTNSAKTARKPDHTTVDIPPACPPPLNHTVVQVNKNANPDPLPKKEEEKKEEEEDDRGEDGPKPMPPYSSMFILSTTNPLRRLCHYILNLRYFEMCILMVIAMSSIALAAEDPVQPNAPRNNVLRYFDYVFTGVFTFEMVIKMIDLGLVLHQGAYFRDLWNILDFIVVSGALVAFAFTGNSKGKDINTIKSLRVLRVLRPLKTIKRLPKLKAVFDCVVNSLKNVFNILIVYMLFMFIFAVVAVQLFKGKFFHCTDESKEFEKDCRGKYLLYEKNEVKARDREWKKYEFHYDNVLWALLTLFTVSTGEGWPQVLKHSVDATFENQGPSPGYRMEMSIFYVVYFVVFPFFFVNIFVALIIITFQEQGDKMMEEYSLEKNERACIDFAISAKPLTRHMPQNKQSFQYRMWQFVVSPPFEYTIMAMIALNTIVLMMKFYGASVAYENALRVFNIVFTSLFSLECVLKVMAFGILNYFRDAWNIFDFVTVLGSITDILVTEFGNNFINLSFLRLFRAARLIKLLRQGYTIRILLWTFVQSFKALPYVCLLIAMLFFIYAIIGMQVFGNIGIDVEDEDSDEDEFQITEHNNFRTFFQALMLLFRSATGEAWHNIMLSCLSGKPCDKNSGILTRECGNEFAYFYFVSFIFLCSFLMLNLFVAVIMDNFEYLTRDSSILGPHHLDEYVRVWAEYDPAACGRIHYKDMYSLLRVISPPLGLGKKCPHRVACKRLLRMDLPVADDNTVHFNSTLMALIRTALDIKIAKGGADKQQMDAELRKEMMAIWPNLSQKTLDLLVTPHKSTDLTVGKIYAAMMIMEYYRQSKAKKLQAMREEQDRTPLMFQRMEPPSPTQEGGPGQNALPSTQLDPGGALMAHESGLKESPSWVTQRAQEMFQKTGTWSPEQGPPTDMPNSQPNSQSVEMREMGRDGYSDSEHYLPMEGQGRAASMPRLPAENQRRRGRPRGNNLSTISDTSPMKRSASVLGPKARRLDDYSLERVPPEENQRHHQRRRDRSHRASERSLGRYTDVDTGLGTDLSMTTQSGDLPSKERDQERGRPKDRKHRQHHHHHHHHHHPPPPDKDRYAQERPDHGRARARDQRWSRSPSEGREHMAHRQGSSSVSGSPAPSTSGTSTPRRGRRQLPQTPSTPRPHVSYSPVIRKAGGSGPRSSSSSSSSSSSRRWPGRAGRPPAALGGTQAPRPSLWPEIGRPRGATAAAARPGWRGGSQARPGASPPGPVDTAGPGGRHLARTCPRGPRVPGTMATTGAPTTTRPMARAAGAARRPWPGPTTRHPPYDTRPRAPPGARPGLPGPRARPAPRLLGTAGDSPTATTRRTDWPGPAGRAPGRACTNPTARVTMIGAKPGRGGARPAPHAPHAHTPPEEPRRGRGGPAQRARERASRETPDSGEARAGPQGCPAETLGQKRPSWAATAPPNQPRSPHPRQGLSGGRQGADKPHSQGI

SEQ ID NO: 12 - protein, 2511 aa, Homo sapiens
MSSWPTRPTKSTAPPRPGGKNGTTIIANCIVLALEQHLPDDDKTPMSERLDDTEPYFIGIFCFEAGIKIIALGFAFHKGSYLRNGWNVMDFVVVLTGILATVGTEFDLRTLRAVRVLRPLKLVSGIPSLQVVLKSIMKAMIPLLQIGLLLFFAILIFAIIGLEFYMGKFHTTCFEEGTDDIQGESPAPCGTEEPARTCPNGTKCQPYWEGPNNGITQFDNILFAVLTVFQCITMEGWTDLLYNSNDASGNTWNWLYFIPLIIIGSFFMLNLVLGVLSGEFAKERERVENRRAFLKLRRQQQIERELNGYMEWISKAEEVILAEDETDGEQRHPFDGALRRTTIKKSKTDLLNPEEAEDQLADIASVGSPFARASIKSAKLENSTFFHKKERRMRFYIRRMVKTQAFYWTVLSLVALNTLCVAIVHYNQPEWLSDFLYYAEFIFLGLFMSEMFIKMYGLGTRPYFHSSFNCFDCGVIIGSIFEVIWAVIKPGTSFGISVLRALRLLRIFKVTKYWASLRNLVVSLLNSMKSIISLLFLLFLFIVVFALLGMQLFGGQFNFDEGTPPTNFDTFPAAIMTVFQILTGEDWNEVMYDGIKSQGGVQGGMVFSIYFIVLTLFGNYTLLNVFLAIAVDNLANAQELTKDEQEEEEAANQKLALQKAKEVAEVSPLSAANMSIAVKEQQKNQKPAKSVWEQRTSEMRKQNLLASREALYNEMDPDERWKAAYTRHLRPDMKTHLDRPLVVDPQENRNNNTNKSRAAEPTVDQRLGQQRAEDFLRKQARYHDRARDPSGSAGLDARRPWAGSQEAELSREGPYGRESDHHAREGSLEQPGFWEGEAERGKAGDPHRRHVHRQGGSRESRSGSPRTGADGEHRRHRAHRRPGEEGPEDKAERRARHREGSRPARGGEGEGEGPDGGERRRRHRHGAPATYEGDARREDKERRHRRRKENQGSGVPVSGPNLSTTRPIQQDLGRQDPPLAEDIDNMKNNKLATAESAAPHGSLGHAGLPQSPAKMGNSTDPGPMLAIPAMATNPQNAASRRTPNNPGNPSNPGPPKTPENSLIVTNPSGTQTNSAKTARKPDHTTVDIPPACPPPLNHTVVQVNKNANPDPLPKKEEEKKEEEEDDRGEDGPKPMPPYSSMFILSTTNPLRRLCHYILNLRYFEMCILMVIAMSSIALAAEDPVQPNAPRNNVLRYFDYVFTGVFTFEMVIKMIDLGLVLHQGAYFRDLWNILDFIVVSGALVAFAFTGNSKGKDINTIKSLRVLRVLRPLKTIKRLPKLKAVFDCVVNSLKNVFNILIVYMLFMFIFAVVAVQLFKGKFFHCTDESKEFEKDCRGKYLLYEKNEVKARDREWKKYEFHYDNVLWALLTLFTVSTGEGWPQVLKHSVDATFENQGPSPGYRMEMSIFYVVYFVVFPFFFVNIFVALIIITFQEQGDKMMEEYSLEKNERACIDFAISAKPLTRHMPQNKQSFQYRMWQFVVSPPFEYTIMAMIALNTIVLMMKFYGASVAYENALRVFNIVFTSLFSLECVLKVMAFGILNYFRDAWNIFDFVTVLGSITDILVTEFGNNFINLSFLRLFRAARLIKLLRQGYTIRILLWTFVQSFKALPYVCLLIAMLFFIYAIIGMQVFGNIGIDVEDEDSDEDEFQITEHNNFRTFFQALMLLFRSATGEAWHNIMLSCLSGKPCDKNSGILTRECGNEFAYFYFVSFIFLCSFLMLNLFVAVIMDNFEYLTRDSSILGPHHLDEYVRVWAEYDPAACGRIHYKDMYSLLRVISPPLGLGKKCPHRVACKRLLRMDLPVADDNTVHFNSTLMALIRTALDIKIAKGGADKQQMDAELRKEMMAIWPNLSQKTLDLLVTPHKSTDLTVGKIYAAMMIMEYYRQSKAKKLQAMREEQDRTPLMFQRMEPPSPTQEGGPGQNALPSTQLDPGGALMAHESGLKESPSWVTQRAQEMFQKTGTWSPEQGPPTDMPNSQPNSQSVEMREMGRDGYSDSEHYLPMEGQGRAASMPRLPAENQTISDTSPMKRSASVLGPKARRLDDYSLERVPPEENQRHHQRRRDRSHRASERSLGRYTDVDTGLGTDLSMTTQSGDLPSKERDQERGRPKDRKHRQHHHHHHHHHHPPPPDKDRYAQERPDHGRARARDQRWSRSPSEGREHMAHRQGSSSVSGSPAPSTSGTSTPRRGRRQLPQTPSTPRPHVSYSPVIRKAGGSGPRSSSSSSSSSSSRRWPGRAGRPPAALGGTQAPRPSLWPEIGRPRGATAAAARPGWRGGSQARPGASPPGPVDTAGPGGRHLARTCPRGPRVPGTMATTGAPTTTRPMARAAGAARRPWPGPTTRHPPYDTRPRAPPGARPGLPGPRARPAPRLLGTAGDSPTATTRRTDWPGPAGRAPGRACTNPTARVTMIGAKPGRGGARPAPHAPHAHTPPEEPRRGRGGPAQRARERASRETPDSGEARAGPQGCPAETLGQKRPSWAATAPPNQPRSPHPRQGLSGGRQGADKPHSQGI

SEQ ID NO: 13 - protein, 2511 aa, Homo sapiens
MSSWPTRPTKSTAPPRPGGKNGTTIIANCIVLALEQHLPDDDKTPMSERLDDTEPYFIGIFCFEAGIKIIALGFAFHKGSYLRNGWNVMDFVVVLTGILATVGTEFDLRTLRAVRVLRPLKLVSGIPSLQVVLKSIMKAMIPLLQIGLLLFFAILIFAIIGLEFYMGKFHTTCFEEGTDDIQGESPAPCGTEEPARTCPNGTKCQPYWEGPNNGITQFDNILFAVLTVFQCITMEGWTDLLYNSNDASGNTWNWLYFIPLIIIGSFFMLNLVLGVLSGEFAKERERVENRRAFLKLRRQQQIERELNGYMEWISKAEEVILAEDETDGEQRHPFDGALRRTTIKKSKTDLLNPEEAEDQLADIASVGSPFARASIKSAKLENSTFFHKKERRMRFYIRRMVKTQAFYWTVLSLVALNTLCVAIVHYNQPEWLSDFLYYAEFIFLGLFMSEMFIKMYGLGTRPYFHSSFNCFDCGVIIGSIFEVIWAVIKPGTSFGISVLRALRLLRIFKVTKYWASLRNLVVSLLNSMKSIISLLFLLFLFIVVFALLGMQLFGGQFNFDEGTPPTNFDTFPAAIMTVFQILTGEDWNEVMYDGIKSQGGVQGGMVFSIYFIVLTLFGNYTLLNVFLAIAVDNLANAQELTKDEQEEEEAANQKLALQKAKEVAEVSPLSAANMSIAVKEQQKNQKPAKSVWEQRTSEMRKQNLLASREALYNEMDPDERWKAAYTRHLRPDMKTHLDRPLVVDPQENRNNNTNKSRAAEPTVDQRLGQQRAEDFLRKQARYHDRARDPSGSAGLDARRPWAGSQEAELSREGPYGRESDHHAREGSLEQPGFWEGEAERGKAGDPHRRHVHRQGGSRESRSGSPRTGADGEHRRHRAHRRPGEEGPEDKAERRARHREGSRPARGGEGEGEGPDGGERRRRHRHGAPATYEGDARREDKERRHRRRKENQGSGVPVSGPNLSTTRPIQQDLGRQDPPLAEDIDNMKNNKLATAESAAPHGSLGHAGLPQSPAKMGNSTDPGPMLAIPAMATNPQNAASRRTPNNPGNPSNPGPPKTPENSLIVTNPSGTQTNSAKTARKPDHTTVDIPPACPPPLNHTVVQVNKNANPDPLPKKEEEKKEEEEDDRGEDGPKPMPPYSSMFILSTTNPLRRLCHYILNLRYFEMCILMVIAMSSIALAAEDPVQPNAPRNNVLRYFDYVFTGVFTFEMVIKMIDLGLVLHQGAYFRDLWNILDFIVVSGALVAFAFTGNSKGKDINTIKSLRVLRVLRPLKTIKRLPKLKAVFDCVVNSLKNVFNILIVYMLFMFIFAVVAVQLFKGKFFHCTDESKEFEKDCRGKYLLYEKNEVKARDREWKKYEFHYDNVLWALLTLFTVSTGEGWPQVLKHSVDATFENQGPSPGYRMEMSIFYVVYFVVFPFFFVNIFVALIIITFQEQGDKMMEEYSLEKNERACIDFAISAKPLTRHMPQNKQSFQYRMWQFVVSPPFEYTIMAMIALNTIVLMMKFYGASVAYENALRVFNIVFTSLFSLECVLKVMAFGILNYFRDAWNIFDFVTVLGSITDILVTEFGNNFINLSFLRLFRAARLIKLLRQGYTIRILLWTFVQSFKALPYVCLLIAMLFFIYAIIGMQVFGNIGIDVEDEDSDEDEFQITEHNNFRTFFQALMLLFRSATGEAWHNIMLSCLSGKPCDKNSGILTRECGNEFAYFYFVSFIFLCSFLMLNLFVAVIMDNFEYLTRDSSILGPHHLDEYVRVWAEYDPAAWGRMPYLDMYQMLRHMSPPLGLGKKCPARVAYKRLLRMDLPVADDNTVHFNSTLMALIRTALDIKIAKGGADKQQMDAELRKEMMAIWPNLSQKTLDLLVTPHKSTDLTVGKIYAAMMIMEYYRQSKAKKLQAMREEQDRTPLMFQRMEPPSPTQEGGPGQNALPSTQLDPGGALMAHESGLKESPSWVTQRAQEMFQKTGTWSPEQGPPTDMPNSQPNSQSVEMREMGRDGYSDSEHYLPMEGQGRAASMPRLPAENQTISDTSPMKRSASVLGPKARRLDDYSLERVPPEENQRHHQRRRDRSHRASERSLGRYTDVDTGLGTDLSMTTQSGDLPSKERDQERGRPKDRKHRQHHHHHHHHHHPPPPDKDRYAQERPDHGRARARDQRWSRSPSEGREHMAHRQGSSSVSGSPAPSTSGTSTPRRGRRQLPQTPSTPRPHVSYSPVIRKAGGSGPRSSSSSSSSSSSRRWPGRAGRPPAALGGTQAPRPSLWPEIGRPRGATAAAARPGWRGGSQARPGASPPGPVDTAGPGGRHLARTCPRGPRVPGTMATTGAPTTTRPMARAAGAARRPWPGPTTRHPPYDTRPRAPPGARPGLPGPRARPAPRLLGTAGDSPTATTRRTDWPGPAGRAPGRACTNPTARVTMIGAKPGRGGARPAPHAPHAHTPPEEPRRGRGGPAQRARERASRETPDSGEARAGPQGCPAETLGQKRPSWAATAPPNQPRSPHPRQGLSGGRQGADKPHSQGI

SEQ ID NO: 14 - protein, 2617 aa, Homo sapiens
MARFGDEMPARYGGGGSGAAAGVVVGSGGGRGAGGSRQGGQPGAQRMYKQSMAQRARTMALYNPIPVRQNCLTVNRSLFLFSEDNVVRKYAKKITEWPPFEYMILATIIANCIVLALEQHLPDDDKTPMSERLDDTEPYFIGIFCFEAGIKIIALGFAFHKGSYLRNGWNVMDFVVVLTGILATVGTEFDLRTLRAVRVLRPLKLVSGIPSLQVVLKSIMKAMIPLLQIGLLLFFAILIFAIIGLEFYMGKFHTTCFEEGTDDIQGESPAPCGTEEPARTCPNGTKCQPYWEGPNNGITQFDNILFAVLTVFQCITMEGWTDLLYNSNDASGNTWNWLYFIPLIIIGSFFMLNLVLGVLSGEFAKERERVENRRAFLKLRRQQQIERELNGYMEWISKAEEVILAEDETDGEQRHPFDGALRRTTIKKSKTDLLNPEEAEDQLADIASVGSPFARASIKSAKLENSTFFHKKERRMRFYIRRMVKTQAFYWTVLSLVALNTLCVAIVHYNQPEWLSDFLYYAEFIFLGLFMSEMFIKMYGLGTRPYFHSSFNCFDCGVIIGSIFEVIWAVIKPGTSFGISVLRALRLLRIFKVTKYWASLRNLVVSLLNSMKSIISLLFLLFLFIVVFALLGMQLFGGQFNFDEGTPPTNFDTFPAAIMTVFQILTGEDWNEVMYDGIKSQGGVQGGMVFSIYFIVLTLFGNYTLLNVFLAIAVDNLANAQELTKDEQEEEEAANQKLALQKAKEVAEVSPLSAANMSIAVKEQQKNQKPAKSVWEQRTSEMRKQNLLASREALYNEMDPDERWKAAYTRHLRPDMKTHLDRPLVVDPQENRNNNTNKSRAAEPTVDQRLGQQRAEDFLRKQARYHDRARDPSGSAGLDARRPWAGSQEAELSREGPYGRESDHHAREGSLEQPGFWEGEAERGKAGDPHRRHVHRQGGSRESRSGSPRTGADGEHRRHRAHRRPGEEGPEDKAERRARHREGSRPARGGEGEGEGPDGGERRRRHRHGAPATYEGDARREDKERRHRRRKENQGSGVPVSGPNLSTTRPIQQDLGRQDPPLAEDIDNMKNNKLATAESAAPHGSLGHAGLPQSPAKMGNSTDPGPMLAIPAMATNPQNAASRRTPNNPGNPSNPGPPKTPENSLIVTNPSGTQTNSAKTARKPDHTTVDIPPACPPPLNHTVVQVNKNANPDPLPKKEEEKKEEEEDDRGEDGPKPMPPYSSMFILSTTNPLRRLCHYILNLRYFEMCILMVIAMSSIALAAEDPVQPNAPRNNVLRYFDYVFTGVFTFEMVIKMIDLGLVLHQGAYFRDLWNILDFIVVSGALVAFAFTGNSKGKDINTIKSLRVLRVLRPLKTIKRLPKLKAVFDCVVNSLKNVFNILIVYMLFMFIFAVVAVQLFKGKFFHCTDESKEFEKDCRGKYLLYEKNEVKARDREWKKYEFHYDNVLWALLTLFTVSTGEGWPQVLKHSVDATFENQGPSPGYRMEMSIFYVVYFVVFPFFFVNIFVALIIITFQEQGDKMMEEYSLEKNERACIDFAISAKPLTRHMPQNKQSFQYRMWQFVVSPPFEYTIMAMIALNTIVLMMKFYGASVAYENALRVFNIVFTSLFSLECVLKVMAFGILNYFRDAWNIFDFVTVLGSITDILVTEFGNNFINLSFLRLFRAARLIKLLRQGYTIRILLWTFVQSFKALPYVCLLIAMLFFIYAIIGMQVFGNIGIDVEDEDSDEDEFQITEHNNFRTFFQALMLLFRSATGEAWHNIMLSCLSGKPCDKNSGILTRECGNEFAYFYFVSFIFLCSFLMLNLFVAVIMDNFEYLTRDSSILGPHHLDEYVRVWAEYDPAACGRIHYKDMYSLLRVISPPLGLGKKCPHRVACKRLLRMDLPVADDNTVHFNSTLMALIRTALDIKIAKGGADKQQMDAELRKEMMAIWPNLSQKTLDLLVTPHKSTDLTVGKIYAAMMIMEYYRQSKAKKLQAMREEQDRTPLMFQRMEPPSPTQEGGPGQNALPSTQLDPGGALMAHESGLKESPSWVTQRAQEMFQKTGTWSPEQGPPTDMPNSQPNSQSVEMREMGRDGYSDSEHYLPMEGQGRAASMPRLPAENQRRRGRPRGNNLSTISDTSPMKRSASVLGPKARRLDDYSLERVPPEENQRHHQRRRDRSHRASERSLGRYTDVDTGLGTDLSMTTQSGDLPSKERDQERGRPKDRKHRQHHHHHHHHHHPPPPDKDRYAQERPDHGRARARDQRWSRSPSEGREHMAHRQGSSSVSGSPAPSTSGTSTPRRGRRQLPQTPSTPRPHVSYSPVIRKAGGSGPRQQQQQQQQQQHSSSSSSSSSSSRRWPGRAGRPPAALGGTQAPRPSLWPEIGRPRGATAAAARPGWRGGSQARPGASPPGPVDTAGPGGRHLARTCPRGPRVPGTMATTGAPTTTRPMARAAGAARRPWPGPTTRHPPYDTRPRAPPGARPGLPGPRARPAPRLLGTAGDSPTATTRRTDWPGPAGRAPGRACTNPTARVTMIGAKPGRGGARPAPHAPHAHTPPEEPRRGRGGPAQRARERASRETPDSGEARAGPQGCPAETLGQKRPSWAATAPPNQPRSPHPRQGLSGGRQGADKPHSQGI

SEQ ID NO: 15 - protein, 1644 aa, Homo sapiens
MSSWPTRPTKSTAPPRPGGKNGTTIIANCIVLALEQHLPDDDKTPMSERLDDTEPYFIGIFCFEAGIKIIALGFAFHKGSYLRNGWNVMDFVVVLTGILATVGTEFDLRTLRAVRVLRPLKLVSGIPSLQVVLKSIMKAMIPLLQIGLLLFFAILIFAIIGLEFYMGKFHTTCFEEGTDDIQGESPAPCGTEEPARTCPNGTKCQPYWEGPNNGITQFDNILFAVLTVFQCITMEGWTDLLYNSNDASGNTWNWLYFIPLIIIGSFFMLNLVLGVLSGEFAKERERVENRRAFLKLRRQQQIERELNGYMEWISKAEEVILAEDETDGEQRHPFDGALRRTTIKKSKTDLLNPEEAEDQLADIASVGSPFARASIKSAKLENSTFFHKKERRMRFYIRRMVKTQAFYWTVLSLVALNTLCVAIVHYNQPEWLSDFLYYAEFIFLGLFMSEMFIKMYGLGTRPYFHSSFNCFDCGVIIGSIFEVIWAVIKPGTSFGISVLRALRLLRIFKVTKYWASLRNLVVSLLNSMKSIISLLFLLFLFIVVFALLGMQLFGGQFNFDEGTPPTNFDTFPAAIMTVFQILTGEDWNEVMYDGIKSQGGVQGGMVFSIYFIVLTLFGNYTLLNVFLAIAVDNLANAQELTKDEQEEEEAANQKLALQKAKEVAEVSPLSAANMSIAVKEQQKNQKPAKSVWEQRTSEMRKQNLLASREALYNEMDPDERWKAAYTRHLRPDMKTHLDRPLVVDPQENRNNNTNKSRAAEPTVDQRLGQQRAEDFLRKQARYHDRARDPSGSAGLDARRPWAGSQEAELSREGPYGRESDHHAREGSLEQPGFWEGEAERGKAGDPHRRHVHRQGGSRESRSGSPRTGADGEHRRHRAHRRPGEEGPEDKAERRARHREGSRPARGGEGEGEGPDGGERRRRHRHGAPATYEGDARREDKERRHRRRKENQGSGVPVSGPNLSTTRPIQQDLGRQDPPLAEDIDNMKNNKLATAESAAPHGSLGHAGLPQSPAKMGNSTDPGPMLAIPAMATNPQNAASRRTPNNPGNPSNPGPPKTPENSLIVTNPSGTQTNSAKTARKPDHTTVDIPPACPPPLNHTVVQVNKNANPDPLPKKEEEKKEEEEDDRGEDGPKPMPPYSSMFILSTTNPLRRLCHYILNLRYFEMCILMVIAMSSIALAAEDPVQPNAPRNNVLRYFDYVFTGVFTFEMVIKMIDLGLVLHQGAYFRDLWNILDFIVVSGALVAFAFTGNSKGKDINTIKSLRVLRVLRPLKTIKRLPKLKAVFDCVVNSLKNVFNILIVYMLFMFIFAVVAVQLFKGKFFHCTDESKEFEKDCRGKYLLYEKNEVKARDREWKKYEFHYDNVLWALLTLFTVSTGEGWPQVLKHSVDATFENQGPSPGYRMEMSIFYVVYFVVFPFFFVNIFVALIIITFQEQGDKMMEEYSLEKNERACIDFAISAKPLTRHMPQNKQSFQYRMWQFVVSPPFEYTIMAMIALNTIVLMMKFYGASVAYENALRVFNIVFTSLFSLECVLKVMAFGILNYFRDAWNIFDFVTVLGSITDILVTEFGNNFINLSFLRLFRAARLIKLLRQGYTIRILLWTFVQSFKCPTPTTRHTHTHTRSQTHTRVLAGYTKPYYYCLQKSI

SEQ ID NO: 16 - protein, 1919 aa, Homo sapiens
MRGLSPDRRLPEPAPCPAAGSPEPRSAGRRQRHVLALPEEEAWRPQQCALLEADASDEVGMLPASPRAASGFDNFFQVQEGEGQGWEGAMALEAGSSPFLPVSPEVMKRRRGGLIEQRDIIKAHEAHKMQSTPQARRKEWEMARFGEAVVARPGSGDGDSDQSRNRQGTPVPASGQAAAYKQTKAQRARTMALYNPIPVRQNCFTVNRSLFIFGEDNIVRKYAKKLIDWPPFEYMILATIIANCIVLALEQHLPEDDKTPMSRRLEKTEPYFIGIFCFEAGIKIVALGFIFHKGSYLRNGWNVMDFIVVLSGILATAGTHFNTHVDLRTLRAVRVLRPLKLVSGIPSLQIVLKSIMKAMVPLLQIGLLLFFAILMFAIIGLEFYSGKLHRACFMNNSGILEGFDPPHPCGVQGCPAGYECKDWIGPNDGITQFDNILFAVLTVFQCITMEGWTTVLYNTNDALGATWNWLYFIPLIIIGSFFVLNLVLGVLSGEFAKERERVENRRAFMKLRRQQQIERELNGYRAWIDKAEEVMLAEENKNAGTSALEVLRRATIKRSRTEAMTRDSSDEHCVDISSVGTPLARASIKSAKVDGVSYFRHKERLLRISIRHMVKSQVFYWIVLSLVALNTACVAIVHHNQPQWLTHLLYYAEFLFLGLFLLEMSLKMYGMGPRLYFHSSFNCFDFGVTVGSIFEVVWAIFRPGTSFGISVLRALRLLRIFKITKYWASLRNLVVSLMSSMKSIISLLFLLFLFIVVFALLGMQLFGGRFNFNDGTPSANFDTFPAAIMTVFQILTGEDWNEVMYNGIRSQGGVSSGMWSAIYFIVLTLFGNYTLLNVFLAIAVDNLANAQELTKDEQEEEEAFNQKHALQKAKEVSPMSAPNMPSIERERRRRHHMSVWEQRTSQLRKHMQMSSQEALNREEAPTMNPLNPLNPLSSLNPLNAHPSLYRRPRAIEGLALGLALEKFEEERISRGGSLKGDGGDRSSALDNQRTPLSLGQREPPWLARPCHGNCDPTQQEAGGGEAVVTFEDRARHRQSQRRSRHRRVRTEGKESSSASRSRSASQERSLDEAMPTEGEKDHELRGNHGAKEPTIQEERAQDLRRTNSLMVSRGSGLAGGLDEADTPLVLPHPELEVGKHVVLTEQEPEGSSEQALLGNVQLDMGRVISQSEPDLSCITANTDKATTESTSVTVAIPDVDPLVDSTVVHISNKTDGEASPLKEAEIREDEEEVEKKKQKKEKRETGKAMVPHSSMFIFSTTNPIRRACHYIVNLRYFEMCILLVIAASSIALAAEDPVLTNSERNKVLRYFDYVFTGVFTFEMVIKMIDQGLILQDGSYFRDLWNILDFVVVVGALVAFALANALGTNKGRDIKTIKSLRVLRVLRPLKTIKRLPKLKAVFDCVVTSLKNVFNILIVYKLFMFIFAVIAVQLFKGKFFYCTDSSKDTEKECIGNYVDHEKNKMEVKGREWKRHEFHYDNIIWALLTLFTVSTGEGWPQVLQHSVDVTEEDRGPSRSNRMEMSIFYVVYFVVFPFFFVNIFVALIIITFQEQGDKMMEECSLEKNERACIDFAISAKPLTRYMPQNRHTFQYRVWHFVVSPSFEYTIMAMIALNTVVLMMKYYSAPCTYELALKYLNIAFTMVFSLECVLKVIAFGFLNYFRDTWNIFDFITVIGSITEIILTDSKLVNTSGFNMSFLKLFRAARLIKLLRQGYTIRILLWTFVQSFKALPYVCLLIAMLFFIYAIIGMQVFGNIKLDEESHINRHNNFRSFFGSLMLLFRSATGEAWQEIMLSCLGEKGCEPDTTAPSGQNENERCGTDLAYVYFVSFIFFCSFLMLNLFVAVIMDNFEYLTRDSSILGPHHLDEFVRVWAEYDRAAWCVGPSAAPAGPRAKVSGVPREEAGIGATQMPACYRRKGDSS

SEQ ID NO: 17 - protein, 1481 aa, Homo sapiens
MSESEGGKDTTPEPSPANGAGPGPEWGLCPGPPAVEGESSGASGLGTPKRRNQHSKHKTVAVASAQRSPRALFCLTLANPLRRSCISIVEWKPFDILILLTIFANCVALGVYIPFPEDDSNTANHNLEQVEYVFLVIFTVETVLKIVAYGLVLHPSAYIRNGWNLLDFIIVVVGLFSVLLEQGPGRPGDAPHTGGKPGGFDVKALRAFRVLRPLRLVSGVPSLHIVLNSIMKALVPLLHIALLVLFVIIIYAIIGLELFLGRMHKTCYFLGSDMEAEEDPSPCASSGSGRACTLNQTECRGRWPGPNGGITNFDNFFFAMLTVFQCVTMEGWTDVLYWMQDAMGYELPWVYFVSLVIFGSFFVLNLVLGVLSGEFSKEREKAKARGDFQKQREKQQMEEDLRGYLDWITQAEELDMEDPSADDNLGSMAEEGRAGHRPQLAELTNRRRGRLRWFSHSTRSTHSTSSHASLPASDTGSMTETQGDEDEEEGALASCTRCLNKIMKTRVCRRLRRANRVLRARCRRAVKSNACYWAVLLLVFLNTLTIASEHHGQPVWLTQIQEYANKVLLCLFTVEMLLKLYGLGPSAYVSSFFNRFDCFVVCGGILETTLVEVGAMQPLGISVLRCVRLLRIFKVTRHWASLSNLVASLLNSMKSIASLLLLLFLFIIIFSLLGMQLFGGKFNFDQTHTKRSTFDTFPQALLTVFQILTGEDWNVVMYDGIMAYGGPFFPGMLVCIYFIILFICGNYILLNVFLAIAVDNLASGDAGTAKDKGGEKSNEKDLPQENEGLVPGVEKEEEEGARREGADMEEEEEEEEEEEEEEEEEGAGGVELLQEVVPKEKVVPIPEGSAFFCLSQTNPLRKGCHTLIHHHVFTNLILVFIILSSVSLAAEDPIRAHSFRNHILGYFDYAFTSIFTVEILLKMTVFGAFLHRGSFCRSWFNMLDLLVVSVSLISFGIHSSAISVVKILRVLRVLRPLRAINRAKGLKHVVQCVFVAIRTIGNIMIVTTLLQFMFACIGVQLFKGKFYTCTDEAKHTPQECKGSFLVYPDGDVSRPLVRERLWVNSDFNFDNVLSAMMALFTVSTFEGWPALLYKAIDAYAEDHGPIYNYRVEISVFFIVYIIIIAFFMMNIFVGFVIITFRAQGEQEYQNCELDKNQRQCVEYALKAQPLRRYIPKNPHQYRVWATVNSAAFEYLMFLLILLNTVALAMQHYEQTAPFNYAMDILNMVFTGLFTIEMVLKIIAFKPKHYFTDAWNTFDALIVVGSIVDIAVTEVNNGGHLGESSEDSSRISITFFRLFRVMRLVKLLSKGEGIRTLLWTFIKSFQALPYVALLIAMIFFIYAVIGMQMFGKVALQDGTQINRNNNFQTFPQAVLLLFRCATGEAWQEIMLASLPGNRCDPESDFGPGEEFTCGSNFAIAYFISFFMLCAFLIINLFVAVIMDNFDYLTRDWSILGPHHLDEFKRIWSEYDPGAKYALYTLT

SEQ ID NO: 18 - protein, 2268 aa, Homo sapiens
MDEEEDGAGAEESGQPRSFMRLNDLSGAGGRPGPGSAEKDPGSADSEAEGLPYPALAPVVFFYLSQDSRPRSWCLRTVCNPWFERISMLVILLNCVTLGMFRPCEDIACDSQRCRILQAFDDFIFAFFAVEMVVKMVALGIFGKKCYLGDTWNRLDFFIVIAGMLEYSLDLQNVSFSAVRTVRVLRPLRAINRVPSMRILVTLLLDTLPMLGNVLLLCFFVFFIFGIVGVQLWAGLLRNRCFLPENFSLPLSVDLERYYQTENEDESPFICSQPRENGMRSCRSVPTLRGDGGGGPPCGLDYEAYNSSSNTTCVNWNQYYTNCSAGEHNPFKGAINFDNIGYAWIAIFQVITLEGWVDIMYFVMDAHSFYNFIYFILLIIVGSFFMINLCLVVIATQFSETKQRESQLMREQRVRFLSNASTLASFSEPGSCYEELLKYLVYILRKAARRLAQVSRAAGVRVGLLSSPAPLGGQETQPSSSCSRSHRRLSVHHLVHHHHHHHHHYHLGNGTLRAPRASPEIQDRDANGSRRLMLPPPSTPALSGAPPGGAESVHSFYHADCHLEPVRCQAPPPRSPSEASGRTVGSGKVYPTVHTSPPPETLKEKALVEVAASSGPPTLTSLNIPPGPYSSMHKLLETQSTGACQSSCKISSPCLKADSGACGPDSCPYCARAGAGEVELADREMPDSDSEAVYEFTQDAQHSDLRDPHSRRQRSLGPDAEPSSVLAFWRLICDTFRKIVDSKYFGRGIMIAILVNTLSMGIEYHEQPEELTNALEISNIVFTSLFALEMLLKLLVYGPFGYIKNPYNIFDGVIVVISVWEIVGQQGGGLSVLRTFRLMRVLKLVRFLPALQRQLVVLMKTMDNVATFCMLLMLFIFIFSILGMHLFGCKFASERDGDTLPDRKNFDSLLWAIVTVFQILTQEDWNKVLYNGMASTSSWAALYFIALMTFGNYVLFNLLVAILVEGFQAEGDANKSESEPDFFSPSLDGDGDRKKCLALVSLGEHPELRKSLLPPLIIHTAATPMSLPKSTSTGLGEALGPASRRTSSSGSAEPGAAHEMKSPPSARSSPHSPWSAASSWTSRRSSRNSLGRAPSLKRRSPSGERRSLLSGEGQESQDEEESSEEERASPAGSDHRHRGSLEREAKSSFDLPDTLQVPGLHRTASGRGSASEHQDCNGKSASGRLARALRPDDPPLDGDDADDEGNLSKGERVRAWIRARLPACCLERDSWSAYIFPPQSRFRLLCHRIITHKMFDHVVLVIIFLNCITIAMERPKIDPHSAERIFLTLSNYIFTAVFLAEMTVKVVALGWCFGEQAYLRSSWNVLDGLLVLISVIDILVSMVSDSGTKILGMLRVLRLLRTLRPLRVISRAQGLKLVVETLMSSLKPIGNIVVICCAFFIIFGILGVQLFKGKFFVCQGEDTRNITNKSDCAEASYRWVRHKYNFDNLGQALMSLFVLASKDGWVDIMYDGLDAVGVDQQPIMNHNPWMLLYFISFLLIVAFFVLNMFVGVVVENFHKCRQHQEEEEARRREEKRLRRLEKKRRSKEKQMADLMLDDVIASGSSASAASEAQCKPYYSDYSRFRLLVHHLCTSHYLDLFITGVIGLNVVTMAMEHYQQPQILDEALKICNYIFTVIFVLESVFKLVAFGFRRFFQDRWNQLDLAIVLLSIMGITLEEIEVNASLPINPTIIRIMRVLRIARVLKLLKMAVGMRALLDTVMQALPQVGNLGLLFMLLFFIFAALGVELFGDLECDETHPCEGLGRHATFRNFGMAFLTLFRVSTGDNWNGIMKDTLRDCDQESTCYNTVISPIYFVSFVLTAQFVLVNVVIAVLMKHLEESNKEAKEEAELEAELELEMKTLSPQPHSPLGSPFLWPGVEGPDSPDSPKPGALHPAAHARSASHFSLEHPTMQPHPTELPGPDLLTVRKSGVSRTHSLPNDSYMCRHGSTAEGPLGHRGWGLPKAQSGSVLSVHSQPADTSYILQLPKDAPHLLQPHSAPTWGTIPKLPPPGRSPLAQRPLRRQAAIRTDSLDVQGLGSREDLLAEVSGPSPPLARAYSFWGQSSTQAQQHSRSHSKISKHMTPPAPCPGPEPNWGKGPPETRSSLELDTELSWISGDLLPPGGQEEPPSPRDLKKCYSVEAQSCQRRPTSWLDEQRRHSIAVSCLDSGSQPHLGTDPSNLGGQPLGGPGSRPKKKLSPPSITIDPPESQGPRTPPSPGICLRRRAPSSDSKDPLASGPPDSMAASPSPKKDVLSLSGLSSDPADLDP

SEQ ID NO: 19 - protein, 1513 aa, Homo sapiens
MDEEEDGAGAEESGQPRSFMRLNDLSGAGGRPGPGSAEKDPGSADSEAEGLPYPALAPVVFFYLSQDSRPRSWCLRTVCNPWFERISMLVILLNCVTLGMFRPCEDIACDSQRCRILQAFDDFIFAFFAVEMVVKMVALGIFGKKCYLGDTWNRLDFFIVIAGMLEYSLDLQNVSFSAVRTVRVLRPLRAINRVPSMRILVTLLLDTLPMLGNVLLLCFFVFFIFGIVGVQLWAGLLRNRCFLPENFSLPLSVDLERYYQTENEDESPFICSQPRENGMRSCRSVPTLRGDGGGGPPCGLDYEAYNSSSNTTCVNWNQYYTNCSAGEHNPFKGAINFDNIGYAWIAIFQVITLEGWVDIMYFVMDAHSFYNFIYFILLIIVGSFFMINLCLVVIATQFSETKQRESQLMREQRVRFLSNASTLASFSEPGSCYEELLKYLVYILRKAARRLAQVSRAAGVRVGLLSSPAPLGGQETQPSSSCSRSHRRLSVHHLVHHHHHHHHHYHLGNGTLRAPRASPEIQDRDANGSRRLMLPPPSTPALSGAPPGGAESVHSFYHADCHLEPVRCQAPPPRSPSEASGRTVGSGKVYPTVHTSPPPETLKEKALVEVAASSGPPTLTSLNIPPGPYSSMHKLLETQSTGACQSSCKISSPCLKADSGACGPDSCPYCARAGAGEVELADREMPDSDSEAVYEFTQDAQHSDLRDPHSRRQRSLGPDAEPSSVLAFWRLICDTFRKIVDSKYFGRGIMIAILVNTLSMGIEYHEQPEELTNALEISNIVFTSLFALEMLLKLLVYGPFGYIKNPYNIFDGVIVVISVWEIVGQQGGGLSVLRTFRLMRVLKLVRFLPALQRQLVVLMKTMDNVATFCMLLMLFIFIFSILGMHLFGCKFASERDGDTLPDRKNFDSLLWAIVTVFQILTQEDWNKVLYNGMASTSSWAALYFIALMTFGNYVLFNLLVAILVEGFQAEGDANKSESEPDFFSPSLDGDGDRKKCLALVSLGEHPELRKSLLPPLIIHTAATPMSLPKSTSTGLGEALGPASRRTSSSGSAEPGAAHEMKSPPSARSSPHSPWSAASSWTSRRSSRNSLGRAPSLKRRSPSGERRSLLSGEGQESQDEEESSEEERASPAGSDHRHRGSLEREAKSSFDLPDTLQVPGLHRTASGRGSASEHQDCNGKSASGRLARALRPDDPPLDGDDADDEGNLSKGERVRAWIRARLPACCLERDSWSAYIFPPQSRFRLLCHRIITHKMFDHVVLVIIFLNCITIAMERPKIDPHSAERIFLTLSNYIFTAVFLAEMTVKVVALGWCFGEQAYLRSSWNVLDGLLVLISVIDILVSMVSDSGTKILGMLRVLRLLRTLRPLRVISRAQGLKLVVETLMSSLKPIGNIVVICCAFFIIFGILGVQLFKGKFFVCQGEDTRNITNKSDCAEASYRWVRHKYNFDNLGQALMSLFVLASKDGWVDIMYDGLDAVGVDQQVGLRWAGSICGLRSLSMGCFQDRKSKAGCKMP

SEQ ID NO: 20 - protein, 413 aa, Homo sapiens
MMMMMMMKKMQHQRQQQADHANEANYARGTRLPLSGEGPTSQPNSSKQTVLSWQAAIDAARQAKAAQTMSTSAPPPVGSLSQRKRQQYAKSKKQGNSSNSRPARALFCLSLNNPIRRACISIVEWKPFDIFILLAIFANCVALAIYIPFPEDDSNSTNHNLEKVEYAFLIIFTVETFLKIIAYGLLLHPNAYVRNGWNLLDFVIVIVGLFSVILEQLTKETEGGNHSSGKSGGFDVKALRAFRVLRPLRLVSGVPSLQVVLNSIIKAMVPLLHIALLVLFVIIIYAIIGLELFIGKMHKTCFFADSDIVAEEDPAPCAFSGNGRQCTANGTECRSGWVGPNGGITNFDNFAFAMLTVFQCITMEGWTDVLYWMNDAMGFELPWVYFVSLVIFGSFFVLNLVLGVLSGHSGSRL

SEQ ID NO: 21 - protein, 407 aa, Homo sapiens
MMMMMMMKKMQHQRQQQADHANEANYARGTRLPLSGEGPTSQPNSSKQTVLSWQAAIDAARQAKAAQTMSTSAPPPVGSLSQRKRQQYAKSKKQGNSSNSRPARALFCLSLNNPIRRACISIVEWKPFDIFILLAIFANCVALAIYIPFPEDDSNSTNHNLEKVEYAFLIIFTVETFLKIIAYGLLLHPNAYVRNGWNLLDFVIVIVGLFSVILEQLTKETEGGNHSSGKSGGFDVKALRAFRVLRPLRLVSGVPSLQVVLNSIIKAMVPLLHIALLVLFVIIIYAIIGLELFIGKMHKTCFFADSDIVAEEDPAPCAFSGNGRQCTANGTECRSGWVGPNGGITNFDNFAFAMLTVFQCITMEGWTDVLYWVNDAIGWEWPWVYFVSLIILGSFFVLNLVLGVLSG

SEQ ID NO: 22 - protein, 2152 aa, Homo sapiens
MMMMMMMKKMQHQRQQQADHANEANYARGTRLPLSGEGPTSQPNSSKQTVLSWQAAIDAARQAKAAQTMSTSAPPPVGSLSQRKRQQYAKSKKQGNSSNSRPARALFCLSLNNPIRRACISIVEWKPFDIFILLAIFANCVALAIYIPFPEDDSNSTNHNLEKVEYAFLIIFTVETFLKIIAYGLLLHPNAYVRNGWNLLDFVIVIVGLFSVILEQLTKETEGGNHSSGKSGGFDVKALRAFRVLRPLRLVSGVPSLQVVLNSIIKAMVPLLHIALLVLFVIIIYAIIGLELFIGKMHKTCFFADSDIVAEEDPAPCAFSGNGRQCTANGTECRSGWVGPNGGITNFDNFAFAMLTVFQCITMEGWTDVLYWMNDAMGFELPWVYFVSLVIFGSFFVLNLVLGVLSGEFSKEREKAKARGDFQKLREKQQLEEDLKGYLDWITQAEDIDPENEEEGGEEGKRNTSMPTSETESVNTENVSGEGENRGCCGSLCQAISKSKLSRRWRRWNRFNRRRCRAAVKSVTFYWLVIVLVFLNTLTISSEHYNQPDWLTQIQDIANKVLLALFTCEMLVKMYSLGLQAYFVSLFNRFDCFVVCGGITETILVELEIMSPLGISVFRCVRLLRIFKVTRHWTSLSNLVASLLNSMKSIASLLLLLFLFIIIFSLLGMQLFGGKFNFDETQTKRSTFDNFPQALLTVFQILTGEDWNAVMYDGIMAYGGPSSSGMIVCIYFIILFICGNYILLNVFLAIAVDNLADAESLNTAQKEEAEEKERKKIARKESLENKKNNKPEVNQIANSDNKVTIDDYREEDEDKDPYPPCDVPVGEEEEEEEEDEPEVPAGPRPRRISELNMKEKIAPIPEGSAFFILSKTNPIRVGCHKLINHHIFTNLILVFIMLSSAALAAEDPIRSHSFRNTILGYFDYAFTAIFTVEILLKMTTFGAFLHKGAFCRNYFNLLDMLVVGVSLVSFGIQSSAISVVKILRVLRVLRPLRAINRAKGLKHVVQCVFVAIRTIGNIMIVTTLLQFMFACIGVQLFKGKFYRCTDEAKSNPEECRGLFILYKDGDVDSPVVRERIWQNSDFNFDNVLSAMMALFTVSTFEGWPALLYKAIDSNGENIGPIYNHRVEISIFFIIYIIIVAFFMMNIFVGFVIVTFQEQGEKEYKNCELDKNQRQCVEYALKARPLRRYIPKNPYQYKFWYVVNSSPFEYMMFVLIMLNTLCLAMQHYEQSKMFNDAMDILNMVFTGVFTVEMVLKVIAFKPKGYFSDAWNTFDSLIVIGSIIDVALSEADPTESENVPVPTATPGNSEESNRISITFFRLFRVMRLVKLLSRGEGIRTLLWTFIKSFQALPYVALLIAMLFFIYAVIGMQMFGKVAMRDNNQINRNNNFQTFPQAVLLLFRCATGEAWQEIMLACLPGKLCDPESDYNPGEEYTCGSNFAIVYFISFYMLCAFLIINLFVAVIMDNFDYLTRDWSILGPHHLDEFKRIWSEYDPEAKGRIKHLDVVTLLRRIQPPLGFGKLCPHRVACKRLVAMNMPLNSDGTVMFNATLFALVRTALKIKTEGNLEQANEELRAVIKKIWKKTSMKLLDQVVPPAGDDEVTVGKFYATFLIQDYFRKFKKRKEQGLVGKYPAKNTTIALQAGLRTLHDIGPEIRRAISCDLQDDEPEETKREEEDDVFKRNGALLGNHVNHVNSDRRDSLQQTNTTHRPLHVQRPSIPPASDTEKPLFPPAGNSVCHNHHNHNSIGKQVPTSTNANLNNANMSKAAHGKRPSIGNLEHVSENGHHSSHKHDREPQRRSSVKRSDSGDEQLPTICREDPEIHGYFRDPHCLGEQEYFSSEECYEDDSSPTWSRQNYGYYSRYPGRNIDSERPRGYHHPQGFLEDDDSPVCYDSRRSPRRRLLPPTPASHRRSSFNFECLRRQSSQEEVPSSPIFPHRTALPLHLMQQQIMAVAGLDSSKAQKYSPSHSTRSWATPPATPPYRDWTPCYTPLIQVEQSEALDQVNGSLPSLHRSSWYTDEPDISYRTFTPASLTVPSSFRNKNSDKQRSADSLVEAVLISEGLGRYARDPKFVSATKHEIADACDLTIDEMESAASTLLNGNVRPRANGDVGPLSHRQDYELQDFGPGYSDEEPDPGRDEEDLADEMICITTL

SEQ ID NO: 23 - DNA, 7895 bp, Homo sapiens
cgaggccgccgccgtcgcctccgccgggcgagccggagccggagtcgagccgcggccgggagccgggcgggctggggacgcgggccgggggcggaggcgctgggggccggggccggggccgggggcggaggcgctgggggccggggccggggccgggcgccgagcggggtccgcggtgaccgcgccgcccgggcgatgcccgcggggacgccgccggccagcagagcgaggtgctgccggccgccaccatgaccgagggcgcacgggccgccgacgaggtccgggtgcccctgggcgcgccgccccctggccctgcggcgttggtgggggcgtccccggagagccccggggcgccgggacgcgaggcggagcgggggtccgagctcggcgtgtcaccctccgagagcccggcggccgagcgcggcgcggagctgggtgccgacgaggagcagcgcgtcccgtacccggccttggcggccacggtcttcttctgcctcggtcagaccacgcggccgcgcagctggtgcctccggctggtctgcaacccatggttcgagcacgtgagcatgctggtaatcatgctcaactgcgtgaccctgggcatgttccggccctgtgaggacgttgagtgcggctccgagcgctgcaacatcctggaggcctttgacgccttcattttcgccttttttgcggtggagatggtcatcaagatggtggccttggggctgttcgggcagaagtgttacctgggtgacacgtggaacaggctggatttcttcatcgtcgtggcgggcatgatggagtactcgttggacggacacaacgtgagcctctcggctatcaggaccgtgcgggtgctgcggcccctccgcgccatcaaccgcgtgcctagcatgcggatcctggtcactctgctgctggatacgctgcccatgctcgggaacgtccttctgctgtgcttcttcgtcttcttcattttcggcatcgttggcgtccagctctgggctggcctcctgcggaaccgctgcttcctggacagtgcctttgtcaggaacaacaacctgaccttcctgcggccgtactaccagacggaggagggcgaggagaacccgttcatctgctcctcacgccgagacaacggcatgcagaagtgctcgcacatccccggccgccgcgagctgcgcatgccctgcaccctgggctgggaggcctacacgcagccgcaggccgagggggtgggcgctgcacgcaacgcctgcatcaactggaaccagtactacaacgtgtgccgctcgggtgactccaacccccacaacggtgccatcaacttcgacaacatcggctacgcctggattgccatcttccaggtgatcacgctggaaggctgggtggacatcatgtactacgtcatggacgcccactcattctacaacttcatctatttcatcctgctcatcatcgtgggctccttcttcatgatcaacctgtgcctggtggtgattgccacgcagttctcggagacgaagcagcgggagagtcagctgatgcgggagcagcgggcacgccacctgtccaacgacagcacgctggccagcttctccgagcctggcagctgctacgaagagctgctgaagtacgtgggccacatattccgcaaggtcaagcggcgcagcttgcgcctctacgcccgctggcagagccgctggcgcaagaaggtggaccccagtgctgtgcaaggccagggtcccgggcaccgccagcgccgggcaggcaggcacacagcctcggtgcaccacctggtctaccaccaccatcaccaccaccaccaccactaccatttcagccatggcagcccccgcaggcccggccccgagccaggcgcctgcgacaccaggctggtccgagctggcgcgcccccctcgccaccttccccaggccgcggaccccccgacgcagagtctgtgcacagcatctaccatgccgactgccacatagaggggccgcaggagagggcccgggtggcacatgccgcagccactgccgctgccagcctcaggctggccacagggctgggcaccatgaactaccccacgatcctgccctcaggggtgggcagcggcaaaggcagcaccagccccggacccaaggggaagtgggccggtggaccgccaggcaccggggggcacggcccgttgagcttgaacagccctgatccctacgagaagatcccgcatgtggtcggggagcatggactgggccaggcccctggccatctgtcgggcctcagtgtgccctgccccctgcccagccccccagcgggcacactgacctgtgagctgaagagctgcccgtactgcacccgtgccctggaggacccggagggtgagctcagcggctcggaaagtggagactcagatggccgtggcgtctatgaattcacgcaggacgtccggcacggtgaccgctgggaccccacgcgaccaccccgtgcgacggacacaccaggcccaggcccaggcagcccccagcggcgggcacagcagagggcagccccgggcgagccaggctggatgggccgcctctgggttaccttcagcggcaagctgcgccgcatcgtggacagcaagtacttcagccgtggcatcatgatggccatccttgtcaacacgctgagcatgggcgtggagtaccatgagcagcccgaggagctgactaatgctctggagatcagcaacatcgtgttcaccagcatgtttgccctggagatgctgctgaagctgctggcctgcggccctctgggctacatccggaacccgtacaacatcttcgacggcatcatcgtggtcatcagcgtctgggagatcgtggggcaggcggacggtggcttgtctgtgctgcgcaccttccggctgctgcgtgtgctgaagctggtgcgctttctgccagccctgcggcgccagctcgtggtgctggtgaagaccatggacaacgtggctaccttctgcacgctgctcatgctcttcattttcatcttcagcatcctgggcatgcaccttttcggctgcaagttcagcctgaagacagacaccggagacaccgtgcctgacaggaagaacttcgactccctgctgtgggccatcgtcaccgtgttccagatcctgacccaggaggactggaacgtggtcctgtacaacggcatggcctccacctcctcctgggccgccctctacttcgtggccctcatgaccttcggcaactatgtgctcttcaacctgctggtggccatcctcgtggagggcttccaggcggagggcgatgccaacagatccgacacggacgaggacaagacgtcggtccacttcgaggaggacttccacaagctcagagaactccagaccacagagctgaagatgtgttccctggccgtgacccccaacgggcacctggagggacgaggcagcctgtcccctcccctcatcatgtgcacagctgccacgcccatgcctacccccaagagctcaccattcctggatgcagcccccagcctcccagactctcggcgtggcagcagcagctccggggacccgccactgggagaccagaagcctccggccagcctccgaagttctccctgtgccccctggggccccagtggcgcctggagcagccggcgctccagctggagcagcctgggccgtgcccccagcctcaagcgccgcggccagtgtggggaacgtgagtccctgctgtctggcgagggcaagggcagcaccgacgacgaagctgaggacggcagggccgcgcccgggccccgtgccaccccactgcggcgggccgagtccctggacccacggcccctgcggccggccgccctcccgcctaccaagtgccgcgatcgcgacgggcaggtggtggccctgcccagcgacttcttcctgcgcatcgacagccaccgtgaggatgcagccgagcttgacgacgactcggaggacagctgctgcctccgcctgcataaagtgctggagccctacaagccccagtggtgccggagccgcgaggcctgggccctctacctcttctccccacagaaccggttccgcgtctcctgccagaaggtcatcacacacaagatgtttgatcacgtggtcctcgtcttcatcttcctcaactgcgtcaccatcgccctggagaggcctgacattgatcccggcagcaccgagcgggtcttcctcagcgtctccaattacatcttcacggccatcttcgtggcggagatgatggtgaaggtggtggccctggggctgctgtccggcgagcacgcctacctgcagagcagctggaacctgctggatgggctgctggtgctggtgtccctggtggacattgtcgtggccatggcctcggctggtggcgccaagatcctgggtgttctgcgcgtgctgcgtctgctgcggaccctgcggcctctgagggtcatcagccgggccccgggcctcaagctggtggtggagacgctgatatcatcactcaggcccattgggaacatcgtcctcatctgctgcgccttcttcatcatttttggcattttgggtgtgcagctcttcaaagggaagttctactactgcgagggccccgacaccaggaacatctccaccaaggcacagtgccgggccgcccactaccgctgggtgcgacgcaagtacaacttcgacaacctgggccaggccctgatgtcgctgttcgtgctgtcatccaaggatggatgggtgaacatcatgtacgacgggctggatgccgtgggtgtcgaccagcagcctgtgcagaaccacaacccctggatgctgctgtacttcatctccttcctgctcatcgtcagcttcttcgtgctcaacatgttcgtgggcgtcgtggtcgagaacttccacaagtgccggcagcaccaggaggcggaggaggcgcggcggcgagaggagaagcggctgcggcgcctagagaggaggcgcaggaaggcccagcgccggccctactatgccgactactcgcccacgcgccgctccattcactcgctgtgcaccagccactatctcgacctcttcatcaccttcatcatctgtgtcaacgtcatcaccatgtccatggagcactataaccaacccaagtcgctggacgaggccctcaagtactgcaactacgtcttcaccatcgtgtttgtcttcgaggctgcactgaagctggtagcatttgggttccgtcggttcttcaaggacaggtggaaccagctggacctggccatcgtgctgctgtcactcatgggcatcacgctggaggagatagagatgagcgccgcgctgcccatcaaccccaccatcatccgcatcatgcgcgtgcttcgcattgcccgtgtgctgaagctgctgaagatggctacgggcatgcgcgccctgctggacactgtggtgcaagctctcccccaggtggggaacctgggccttcttttcatgctcctgttttttatctatgctgcgctgggagtggagctgttcgggaggctggagtgcagtgaagacaacccctgcgagggcctgagcaggcacgccaccttcagcaacttcggcatggccttcctcacgctgttccgcgtgtccacgggggacaactggaacgggatcatgaaggacacgctgcgcgagtgctcccgtgaggacaagcactgcctgagctacctgccggccctgtcgcccgtctacttcgtgaccttcgtgctggtggcccagttcgtgctggtgaacgtggtggtggccgtgctcatgaagcacctggaggagagcaacaaggaggcacgggaggatgcggagctggacgccgagatcgagctggagatggcgcagggccccgggagtgcacgccgggtggacgcggacaggcctcccttgccccaggagagtccgggcgccagggatgccccaaacctggttgcacgcaaggtgtccgtgtccaggatgctctcgctgcccaacgacagctacatgttcaggcccgtggtgcctgcctcggcgccccacccccgcccgctgcaggaggtggagatggagacctatggggccggcacccccttgggctccgttgcctctgtgcactctccgcccgcagagtcctgtgcctccctccagatcccactggctgtgtcgtccccagccaggagcggcgagcccctccacgccctgtcccctcggggcacagcccgctcccccagtctcagccggctgctctgcagacaggaggctgtgcacaccgattccttggaagggaagattgacagccctagggacaccctggatcctgcagagcctggtgagaaaaccccggtgaggccggtgacccaggggggctccctgcagtccccaccacgctccccacggcccgccagcgtccgcactcgtaagcataccttcggacagcgctgcgtctccagccggccggcggccccaggcggagaggaggccgaggcctcggacccagccgacgaggaggtcagccacatcaccagctccgcctgcccctggcagcccacagccgagccccatggccccgaagcctctccggtggccggcggcgagcgggacctgcgcaggctctacagcgtggacgctcagggcttcctggacaagccgggccgggcagacgagcagtggcggccctcggcggagctgggcagcggggagcctggggaggcgaaggcctggggccctgaggccgagcccgctctgggtgcgcgcagaaagaagaagatgagccccccctgcatctcggtggaaccccctgcggaggacgagggctctgcgcggccctccgcggcagagggcggcagcaccacactgaggcgcaggaccccgtcctgtgaggccacgcctcacagggactccctggagcccacagagggctcaggcgccgggggggaccctgcagccaagggggagcgctggggccaggcctcctgccgggctgagcacctgaccgtccccagctttgcctttgagccgctggacctcggggtccccagtggagaccctttcttggacggtagccacagtgtgaccccagaatccagagcttcctcttcaggggccatagtgcccctggaacccccagaatcagagcctcccatgcccgtcggtgaccccccagagaagaggcgggggctgtacctcacagtcccccagtgtcctctggagaaaccagggtccccctcagccacccctgccccagggggtggtgcagatgaccccgtgtagctcggggcttggtgccgcccacggctttggccctggggtctgggggccccgctggggtggaggcccaggcagaaccctgcatggaccctgacttgggtcccgtcgtgagcagaaaggcccggggaggatgacggcccaggccctggttctctgcccagcgaagcaggagtagctgccgggccccacgagcctccatccgttctggttcgggtttctccgagttttgctaccagccgaggctgtgcgggcaactgggtcagcctcccgtcaggagagaagccgcgtctgtgggacgaagaccgggcacccgccagagaggggaaggtaccaggttgcgtcctttcaggccgtcctgtgactctgggagaggtgacacctcactaaggggccgaccccatggagtaacgcgcccggccccgatgcgaatcaggcctcccctacatctgggggcgttggccgcgagattcccattgacacctttgtttcgtgtgcttttaaattcaggttaaatgttgcaataatctgatgcagaagactcagcttctcaagggagagggagggggcggagcggaataaatagtaacttatttaagaaatgcaaat

SEQ ID NO: 24 - DNA, 5283 bp, Homo sapiens
actcaagagcagaataccgggggtgggggcaggcaccaggctccaactggggtgttctgagcgcctgctgtgtgcccgtctagcctggagctcagggtcagggtcggctggaggctaggcagccaggcaggccgggctttcacagtccagagaggctgaatgaggcaggtgtcccaggttccagttgccacccaaatccagagtggcttccctctgtctgtcccgcctctggtcttggttctctcgccatcctgggcatgcaccttttcggctgcaagttcagcctgaagacagacaccggagacaccgtgcctgacaggaagaacttcgactccctgctgtgggccatcgtcaccgtgttccagatcctgacccaggaggactggaacgtggtcctgtacaacggcatggcctccacctcctcctgggccgccctctacttcgtggccctcatgaccttcggcaactatgtgctcttcaacctgctggtggccatcctcgtggagggcttccaggcggagggcgatgccaacagatccgacacggacgaggacaagacgtcggtccacttcgaggaggacttccacaagctcagagaactccagaccacagagctgaagatgtgttccctggccgtgacccccaacgggcacctggagggacgaggcagcctgtcccctcccctcatcatgtgcacagctgccacgcccatgcctacccccaagagctcaccattcctggatgcagcccccagcctcccagactctcggcgtggcagcagcagctccggggacccgccactgggagaccagaagcctccggccagcctccgaagttctccctgtgccccctggggccccagtggcgcctggagcagccggcgctccagctggagcagcctgggccgtgcccccagcctcaagcgccgcggccagtgtggggaacgtgagtccctgctgtctggcgagggcaagggcagcaccgacgacgaagctgaggacggcagggccgcgcccgggccccgtgccaccccactgcggcgggccgagtccctggacccacggcccctgcggccggccgccctcccgcctaccaagtgccgcgatcgcgacgggcaggtggtggccctgcccagcgacttcttcctgcgcatcgacagccaccgtgaggatgcagccgagcttgacgacgactcggaggacagctgctgcctccgcctgcataaagtgctggagccctacaagccccagtggtgccggagccgcgaggcctgggccctctacctcttctccccacagaaccggttccgcgtctcctgccagaaggtcatcacacacaagatgtttgatcacgtggtcctcgtcttcatcttcctcaactgcgtcaccatcgccctggagaggcctgacattgatcccggcagcaccgagcgggtcttcctcagcgtctccaattacatcttcacggccatcttcgtggcggagatgatggtgaaggtggtggccctggggctgctgtccggcgagcacgcctacctgcagagcagctggaacctgctggatgggctgctggtgctggtgtccctggtggacattgtcgtggccatggcctcggctggtggcgccaagatcctgggtgttctgcgcgtgctgcgtctgctgcggaccctgcggcctctgagggtcatcagccgggccccgggcctcaagctggtggtggagacgctgatatcatcactcaggcccattgggaacatcgtcctcatctgctgcgccttcttcatcatttttggcattttgggtgtgcagctcttcaaagggaagttctactactgcgagggccccgacaccaggaacatctccaccaaggcacagtgccgggccgcccactaccgctgggtgcgacgcaagtacaacttcgacaacctgggccaggccctgatgtcgctgttcgtgctgtcatccaaggatggatgggtgaacatcatgtacgacgggctggatgccgtgggtgtcgaccagcagcctgtgcagaaccacaacccctggatgctgctgtacttcatctccttcctgctcatcgtcagcttcttcgtgctcaacatgttcgtgggcgtcgtggtcgagaacttccacaagtgccggcagcaccaggaggcggaggaggcgcggcggcgagaggagaagcggctgcggcgcctagagaggaggcgcaggaaggcccagcgccggccctactatgccgactactcgcccacgcgccgctccattcactcgctgtgcaccagccactatctcgacctcttcatcaccttcatcatctgtgtcaacgtcatcaccatgtccatggagcactataaccaacccaagtcgctggacgaggccctcaagtactgcaactacgtcttcaccatcgtgtttgtcttcgaggctgcactgaagctggtagcatttgggttccgtcggttcttcaaggacaggtggaaccagctggacctggccatcgtgctgctgtcactcatgggcatcacgctggaggagatagagatgagcgccgcgctgcccatcaaccccaccatcatccgcatcatgcgcgtgcttcgcattgcccgtgtgctgaagctgctgaagatggctacgggcatgcgcgccctgctggacactgtggtgcaagctctcccccaggtggggaacctgggccttcttttcatgctcctgttttttatctatgctgcgctgggagtggagctgttcgggaggctggagtgcagtgaagacaacccctgcgagggcctgagcaggcacgccaccttcagcaacttcggcatggccttcctcacgctgttccgcgtgtccacgggggacaactggaacgggatcatgaaggacacgctgcgcgagtgctcccgtgaggacaagcactgcctgagctacctgccggccctgtcgcccgtctacttcgtgaccttcgtgctggtggcccagttcgtgctggtgaacgtggtggtggccgtgctcatgaagcacctggaggagagcaacaaggaggcacgggaggatgcggagctggacgccgagatcgagctggagatggcgcagggccccgggagtgcacgccgggtggacgcggacaggcctcccttgccccaggagagtccgggcgccagggatgccccaaacctggttgcacgcaaggtgtccgtgtccaggatgctctcgctgcccaacgacagctacatgttcaggcccgtggtgcctgcctcggcgccccacccccgcccgctgcaggaggtggagatggagacctatggggccggcacccccttgggctccgttgcctctgtgcactctccgcccgcagagtcctgtgcctccctccagatcccactggctgtgtcgtccccagccaggagcggcgagcccctccacgccctgtcccctcggggcacagcccgctcccccagtctcagccggctgctctgcagacaggaggctgtgcacaccgattccttggaagggaagattgacagccctagggacaccctggatcctgcagagcctggtgagaaaaccccggtgaggccggtgacccaggggggctccctgcagtccccaccacgctccccacggcccgccagcgtccgcactcgtaagcataccttcggacagcgctgcgtctccagccggccggcggccccaggcggagaggaggccgaggcctcggacccagccgacgaggaggtcagccacatcaccagctccgcctgcccctggcagcccacagccgagccccatggccccgaagcctctccggtggccggcggcgagcgggacctgcgcaggctctacagcgtggacgctcagggcttcctggacaagccgggccgggcagacgagcagtggcggccctcggcggagctgggcagcggggagcctggggaggcgaaggcctggggccctgaggccgagcccgctctgggtgcgcgcagaaagaagaagatgagccccccctgcatctcggtggaaccccctgcggaggacgagggctctgcgcggccctccgcggcagagggcggcagcaccacactgaggcgcaggaccccgtcctgtgaggccacgcctcacagggactccctggagcccacagagggctcaggcgccgggggggaccctgcagccaagggggagcgctggggccaggcctcctgccgggctgagcacctgaccgtccccagctttgcctttgagccgctggacctcggggtccccagtggagaccctttcttggacggtagccacagtgtgaccccagaatccagagcttcctcttcaggggccatagtgcccctggaacccccagaatcagagcctcccatgcccgtcggtgaccccccagagaagaggcgggggctgtacctcacagtcccccagtgtcctctggagaaaccagggtccccctcagccacccctgccccagggggtggtgcagatgaccccgtgtagctcggggcttggtgccgcccacggctttggccctggggtctgggggccccgctggggtggaggcccaggcagaaccctgcatggaccctgacttgggtcccgtcgtgagcagaaaggcccggggaggatgacggcccaggccctggttctctgcccagcgaagcaggagtagctgccgggccccacgagcctccatccgttctggttcgggtttctccgagttttgctaccagccgaggctgtgcgggcaactgggtcagcctcccgtcaggagagaagccgcgtctgtgggacgaagaccgggcacccgccagagaggggaaggtaccaggttgcgtcctttcaggccccgcgttgttacaggacactcgctgggggccctgtgcccttgccggcggcaggttgcagccaccgcggcccaatgtcaccttcactcacagtctgagttcttgtccgcctgtcacgccctcaccaccctccccttccagccaccaccctttccgttccgctcgggccttcccagaagcgtcctgtgactctgggagaggtgacacctcactaaggggccgaccccatggagtaacgcgcccggccccgatgcgaatcaggcctcccctacatctgggggcgttggccgcgagattcccattgacacctttgtttcgtgtgcttttaaattcaggttaaatgttgcaataatctgatgcagaagactcagcttctcaagggagagggagggggcggagcggaataaatagtaacttatttaagaaatgcaaat

SEQ ID NO: 25 - DNA, 1211 bp, Homo sapiens
cgaggccgccgccgtcgcctccgccgggcgagccggagccggagtcgagccgcggccgggagccgggcgggctggggacgcgggccgggggcggaggcgctgggggccggggccggggccgggggcggaggcgctgggggccggggccggggccgggcgccgagcggggtccgcggtgaccgcgccgcccgggcgatgcccgcggggacgccgccggccagcagagcgaggtgctgccggccgccaccatgaccgagggcgcacgggccgccgacgaggtccgggtgcccctgggcgcgccgccccctggccctgcggcgttggtgggggcgtccccggagagccccggggcgccgggacgcgaggcggagcgggggtccgagctcggcgtgtcaccctccgagagcccggcggccgagcgcggcgcggagctgggtgccgacgaggagcagcgcgtcccgtacccggccttggcggccacggtcttcttctgcctcggtcagaccacgcggccgcgcagctggtgcctccggctggtctgcaacccatggttcgagcacgtgagcatgctggtaatcatgctcaactgcgtgaccctgggcatgttccggccctgtgaggacgttgagtgcggctccgagcgctgcaacatcctggaggcctttgacgccttcattttcgccttttttgcggtggagatggtcatcaagatggtggccttggggctgttcgggcagaagtgttacctgggtgacacgtggaacaggctggatttcttcatcgtcgtggcgggcatgatggagtactcgttggacggacacaacgtgagcctctcggctatcaggaccgtgcgggtgctgcggcccctccgcgccatcaaccgcgtgcctagcatgcggatcctggtcactctgctgctggatacgctgcccatgctcgggaacgtccttctgctgtgcttcttcgtcttcttcattttcggcatcgttggcgtccagctctgggctggcctcctgcggaaccgctgcttcctggacagtgcctttgtcaggtgcccaggccccacccccgtgaggcccctgcccagatggccctgcccaccatgcagataacgcaccatgtggctccaccgccccacgtggctctgcccaccgtgcagtcacccgccccgccactgctgtccccgtcatggctccgtccaccatgctgtc

SEQ ID NO: 26 - DNA, 3618 bp, Homo sapiens
cagctcctgccagagcggcgctcggcgcggcgcggcgggcccggagcggcggcggcggctcttcctgcctccgcgcccaggagttgccggctccctttgacagcagagagccgggcaggggcctcaggaggactcgctgggagtgggcagaggcgcctcggcccctgccggcccaggcgggccccgcgcgccccccgcccctcctctccgcctcttctcgccctgcctctcccgatttattttttcaaatggtgtagccgccggaggtgcggtgctcagttcttggaaggggcccggatgtactgaggatgcgttacagtttcactcgaggaggcagtagtggaaaggagcagtttttggggtttgatgccataatgggaatcaggtaatcgtcggcggggaagaagaaacgctgcagaccacggcttcctcgaatcttgcgcgaaagccgccggcctcggaggagggattaatccagacccgccggggggtgttttcacatttcttcctcttcgtggctgctcctcctattaaaaccatttttggtccatggtcaatgagaatacgaggatgtacattccagaggaaaaccaccaaggttccaactatgggagcccacgccccgcccatgccaacatgaatgccaatgcggcagcggggctggcccctgagcacatccccaccccgggggctgccctgtcgtggcaggcggccatcgacgcagcccggcaggctaagctgatgggcagcgctggcaatgcgaccatctccacagtcagctccacgcagcggaagcggcagcaatatgggaaacccaagaagcagggcagcaccacggccacacgcccgccccgagccctgctctgcctgaccctgaagaaccccatccggagggcctgcatcagcattgtcgaatggaaaccatttgaaataattattttactgactatttttgccaattgtgtggccttagcgatctatattccctttccagaagatgattccaacgccaccaattccaacctggaacgagtggaatatctctttctcataatttttacggtggaagcgtttttaaaagtaatcgcctatggactcctctttcaccccaatgcctacctccgcaacggctggaacctactagattttataattgtggttgtggggctttttagtgcaattttagaacaagcaaccaaagcagatggggcaaacgctctcggagggaaaggggccggatttgatgtgaaggcgctgagggccttccgcgtgctgcgccccctgcggctggtgtccggagtcccaagtctccaggtggtcctgaattccatcatcaaggccatggtccccctgctgcacatcgccctgcttgtgctgtttgtcatcatcatctacgccatcatcggcttggagctcttcatggggaagatgcacaagacctgctacaaccaggagggcatagcagatgttccagcagaagatgacccttccccttgtgcgctggaaacgggccacgggcggcagtgccagaacggcacggtgtgcaagcccggctgggatggtcccaagcacggcatcaccaactttgacaactttgccttcgccatgctcacggtgttccagtgcatcaccatggagggctggacggacgtgctgtactgggtcaatgatgccgtaggaagggactggccctggatctattttgttacactaatcatcatagggtcattttttgtacttaacttggttctcggtgtgcttagcggagagttttccaaagagagggagaaggccaaggcccggggagatttccagaagctgcgggagaagcagcagctagaagaggatctcaaaggctacctggattggatcactcaggccgaagacatcgatcctgagaatgaggacgaaggcatggatgaggagaagccccgaaacagaggcactccggcgggcatgcttgatcagaagaaagggaagtttgcttggtttagtcactccacagaaacccatgtgagcatgcccaccagtgagaccgagtccgtcaacaccgaaaacgtggctggaggtgacatcgagggagaaaactgcggggccaggctggcccaccggatctccaagtcaaagttcagccgctactggcgccggtggaatcggttctgcagaaggaagtgccgcgccgcagtcaagtctaatgtcttctactggctggtgattttcctggtgttcctcaacacgctcaccattgcctctgagcactacaaccagcccaactggctcacagaagtccaagacacggcaaacaaggccctgctggccctgttcacggcagagatgctcctgaagatgtacagcctgggcctgcaggcctacttcgtgtccctcttcaaccgctttgactgcttcgtcgtgtgtggcggcatcctggagaccatcctggtggagaccaagatcatgtccccactgggcatctccgtgctcagatgcgtccggctgctgaggattttcaagatcacgaggtactggaactccttgagcaacctggtggcatccttgctgaactctgtgcgctccatcgcctccctgctccttctcctcttcctcttcatcatcatcttctccctcctggggatgcagctctttggaggaaagttcaactttgatgagatgcagacccggaggagcacattcgataacttcccccagtccctcctcactgtgtttcagatcctgaccggggaggactggaattcggtgatgtatgatgggatcatggcttatggcggcccctcttttccagggatgttagtctgtatttacttcatcatcctcttcatctgtggaaactatatcctactgaatgtgttcttggccattgctgtggacaacctggctgatgctgagagcctcacatctgcccaaaaggaggaggaagaggagaaggagagaaagaagctggccaggactgccagcccagagaagaaacaagagttggtggagaagccggcagtgggggaatccaaggaggagaagattgagctgaaatccatcacggctgacggagagtctccacccgccaccaagatcaacatggatgacctccagcccaatgaaaatgaggataagagcccctaccccaacccagaaactacaggagaagaggatgaggaggagccagagatgcctgtcggccctcgcccacgaccactctctgagcttcaccttaaggaaaaggcagtgcccatgccagaagccagcgcgtttttcatcttcagctctaacaacaggtttcgcctccagtgccaccgcattgtcaatgacacgatcttcaccaacctgatcctcttcttcattctgctcagcagcatttccctggctgctgaggacccggtccagcacacctccttcaggaaccatgtatgcatcgcctgtgtcttctgcactccttccccctggggctgtgccaggcccacagcttctgttgctgacatcattgttcaatcaggagcccaattctaggtgtcataattagatccacaactaacatttcattaagagagtagggctttgatagaaaaccaccctaggaccacaagcaaataaaagagcatgtaccca

SEQ ID NO: 27 - DNA, 8906 bp, Homo sapiens
cagctcctgccagagcggcgctcggcgcggcgcggcgggcccggagcggcggcggcggctcttcctgcctccgcgcccaggagttgccggctccctttgacagcagagagccgggcaggggcctcaggaggactcgctgggagtgggcagaggcgcctcggcccctgccggcccaggcgggccccgcgcgccccccgcccctcctctccgcctcttctcgccctgcctctcccgatttattttttcaaatggtgtagccgccggaggtgcggtgctcagttcttggaaggggcccggatgtactgaggatgcgttacagtttcactcgaggaggcagtagtggaaaggagcagtttttggggtttgatgccataatgggaatcaggtaatcgtcggcggggaagaagaaacgctgcagaccacggcttcctcgaatcttgcgcgaaagccgccggcctcggaggagggattaatccagacccgccggggggtgttttcacatttcttcctcttcgtggctgctcctcctattaaaaccatttttggtccatggtcaatgagaatacgaggatgtacattccagaggaaaaccaccaaggttccaactatgggagcccacgccccgcccatgccaacatgaatgccaatgcggcagcggggctggcccctgagcacatccccaccccgggggctgccctgtcgtggcaggcggccatcgacgcagcccggcaggctaagctgatgggcagcgctggcaatgcgaccatctccacagtcagctccacgcagcggaagcggcagcaatatgggaaacccaagaagcagggcagcaccacggccacacgcccgccccgagccctgctctgcctgaccctgaagaaccccatccggagggcctgcatcagcattgtcgaatggaaaccatttgaaataattattttactgactatttttgccaattgtgtggccttagcgatctatattccctttccagaagatgattccaacgccaccaattccaacctggaacgagtggaatatctctttctcataatttttacggtggaagcgtttttaaaagtaatcgcctatggactcctctttcaccccaatgcctacctccgcaacggctggaacctactagattttataattgtggttgtggggctttttagtgcaattttagaacaagcaaccaaagcagatggggcaaacgctctcggagggaaaggggccggatttgatgtgaaggcgctgagggccttccgcgtgctgcgccccctgcggctggtgtccggagtcccaagtctccaggtggtcctgaattccatcatcaaggccatggtccccctgctgcacatcgccctgcttgtgctgtttgtcatcatcatctacgccatcatcggcttggagctcttcatggggaagatgcacaagacctgctacaaccaggagggcatagcagatgttccagcagaagatgacccttccccttgtgcgctggaaacgggccacgggcggcagtgccagaacggcacggtgtgcaagcccggctgggatggtcccaagcacggcatcaccaactttgacaactttgccttcgccatgctcacggtgttccagtgcatcaccatggagggctggacggacgtgctgtactggatgcaggacgctatgggctatgagttaccctgggtgtattttgtcagtctggtcatctttggatcctttttcgttctaaatctggttctcggtgtgttgagcggagagttttccaaagagagggagaaggccaaggcccggggagatttccagaagctgcgggagaagcagcagctagaagaggatctcaaaggctacctggattggatcactcaggccgaagacatcgatcctgagaatgaggacgaaggcatggatgaggagaagccccgaaacatgagcatgcccaccagtgagaccgagtccgtcaacaccgaaaacgtggctggaggtgacatcgagggagaaaactgcggggccaggctggcccaccggatctccaagtcaaagttcagccgctactggcgccggtggaatcggttctgcagaaggaagtgccgcgccgcagtcaagtctaatgtcttctactggctggtgattttcctggtgttcctcaacacgctcaccattgcctctgagcactacaaccagcccaactggctcacagaagtccaagacacggcaaacaaggccctgctggccctgttcacggcagagatgctcctgaagatgtacagcctgggcctgcaggcctacttcgtgtccctcttcaaccgctttgactgcttcgtcgtgtgtggcggcatcctggagaccatcctggtggagaccaagatcatgtccccactgggcatctccgtgctcagatgcgtccggctgctgaggattttcaagatcacgaggtactggaactccttgagcaacctggtggcatccttgctgaactctgtgcgctccatcgcctccctgctccttctcctcttcctcttcatcatcatcttctccctcctggggatgcagctctttggaggaaagttcaactttgatgagatgcagacccggaggagcacattcgataacttcccccagtccctcctcactgtgtttcagatcctgaccggggaggactggaattcggtgatgtatgatgggatcatggcttatggcggcccctcttttccagggatgttagtctgtatttacttcatcatcctcttcatctgtggaaactatatcctactgaatgtgttcttggccattgctgtggacaacctggctgatgctgagagcctcacatctgcccaaaaggaggaggaagaggagaaggagagaaagaagctggccaggactgccagcccagagaagaaacaagagttggtggagaagccggcagtgggggaatccaaggaggagaagattgagctgaaatccatcacggctgacggagagtctccacccgccaccaagatcaacatggatgacctccagcccaatgaaaatgaggataagagcccctaccccaacccagaaactacaggagaagaggatgaggaggagccagagatgcctgtcggccctcgcccacgaccactctctgagcttcaccttaaggaaaaggcagtgcccatgccagaagccagcgcgtttttcatcttcagctctaacaacaggtttcgcctccagtgccaccgcattgtcaatgacacgatcttcaccaacctgatcctcttcttcattctgctcagcagcatttccctggctgctgaggacccggtccagcacacctccttcaggaaccatattctgttttattttgatattgtttttaccaccattttcaccattgaaattgctctgaagatgactgcttatggggctttcttgcacaagggttctttctgccggaactacttcaacatcctggacctgctggtggtcagcgtgtccctcatctcctttggcatccagtccagtgcaatcaatgtcgtgaagatcttgcgagtcctgcgagtactcaggcccctgagggccatcaacagggccaaggggctaaagcatgtggttcagtgtgtgtttgtcgccatccggaccatcgggaacatcgtgattgtcaccaccctgctgcagttcatgtttgcctgcatcggggtccagctcttcaagggaaagctgtacacctgttcagacagttccaagcagacagaggcggaatgcaagggcaactacatcacgtacaaagacggggaggttgaccaccccatcatccaaccccgcagctgggagaacagcaagtttgactttgacaatgttctggcagccatgatggccctcttcaccgtctccaccttcgaagggtggccagagctgctgtaccgctccatcgactcccacacggaagacaagggccccatctacaactaccgtgtggagatctccatcttcttcatcatctacatcatcatcatcgccttcttcatgatgaacatcttcgtgggcttcgtcatcgtcacctttcaggagcagggggagcaggagtacaagaactgtgagctggacaagaaccagcgacagtgcgtggaatacgccctcaaggcccggcccctgcggaggtacatccccaagaaccagcaccagtacaaagtgtggtacgtggtcaactccacctacttcgagtacctgatgttcgtcctcatcctgctcaacaccatctgcctggccatgcagcactacggccagagctgcctgttcaaaatcgccatgaacatcctcaacatgctcttcactggcctcttcaccgtggagatgatcctgaagctcattgccttcaaacccaagcactatttctgtgatgcatggaatacatttgacgccttgattgttgtgggtagcattgttgatatagcaatcaccgaggtaaacaacgcagaggaaaactcccgcatctccatcaccttcttccgcctgttccgggtcatgcgtctggtgaagctgctgagccgtggggagggcatccggacgctgctgtggaccttcatcaagtccttccaggccctgccctatgtggccctcctgatcgtgatgctgttcttcatctacgcggtgatcgggatgcaggtgtttgggaaaattgccctgaatgataccacagagatcaaccggaacaacaactttcagaccttcccccaggccgtgctgctcctcttcaggtgtgccaccggggaggcctggcaggacatcatgctggcctgcatgccaggcaagaagtgtgccccagagtccgagcccagcaacagcacggagggtgaaacaccctgtggtagcagctttgctgtcttctacttcatcagcttctacatgctctgtgccttcctgatcatcaacctctttgtagctgtcatcatggacaactttgactacctgacaagggactggtccatccttggtccccaccacctggatgagtttaaaagaatctgggcagagtatgaccctgaagccaagggtcgtatcaaacacctggatgtggtgaccctcctccggcggattcagccgccactaggttttgggaagctgtgccctcaccgcgtggcttgcaaacgcctggtctccatgaacatgcctctgaacagcgacgggacagtcatgttcaatgccaccctgtttgccctggtcaggacggccctgaggatcaaaacagaagggaacctagaacaagccaatgaggagctgcgggcgatcatcaagaagatctggaagcggaccagcatgaagctgctggaccaggtggtgccccctgcaggtgatgatgaggtcaccgttggcaagttctacgccacgttcctgatccaggagtacttccggaagttcaagaagcgcaaagagcagggccttgtgggcaagccctcccagaggaacgcgctgtctctgcaggctggcttgcgcacactgcatgacatcgggcctgagatccgacgggccatctctggagatctcaccgctgaggaggagctggacaaggccatgaaggaggctgtgtccgctgcttctgaagatgacatcttcaggagggccggtggcctgttcggcaaccacgtcagctactaccaaagcgacggccggagcgccttcccccagaccttcaccactcagcgcccgctgcacatcaacaaggcgggcagcagccagggcgacactgagtcgccatcccacgagaagctggtggactccaccttcaccccgagcagctactcgtccaccggctccaacgccaacatcaacaacgccaacaacaccgccctgggtcgcctccctcgccccgccggctaccccagcacggtcagcactgtggagggccacgggccccccttgtcccctgccatccgggtgcaggaggtggcgtggaagctcagctccaacaggatgcactgctgtgacatgctggatggtgggaccttccctcccgccctgggcccccgcagggctcctccctgtctgcatcagcagctccagggttccctggcggggctgagagaggacacaccctgcatcgtgcctggccacgcttcactgtgctgctcttccagagtaggagagtggctcccagcaggctgcacagccccccagcatgccaggtgccactcccgggagagccaggcagccatggcgggtcaggaggagacgtctcaggatgagacctatgaagtgaagatgaaccatgacacggaggcctgcagtgagcccagcctgctctccacagagatgctctcctaccaggatgacgaaaatcggcaactgacgctcccagaggaggacaagagggacatccggcaatctccgaagaggggtttcctccgctctgcctcactaggtcgaagggcctccttccacctggaatgtctgaagcgacagaaggaccgagggggagacatctctcagaagacagtcctgcccttgcatctggttcatcatcaggcattggcagtggcaggcctgagccccctcctccagagaagccattcccctgcctcattccctaggccttttgccaccccaccagccacacctggcagccgaggctggcccccacagcccgtccccaccctgcggcttgagggggtcgagtccagtgagaaactcaacagcagcttcccatccatccactgcggctcctgggctgagaccacccccggtggcgggggcagcagcgccgcccggagagtccggcccgtctccctcatggtgcccagccaggctggggccccagggaggcagttccacggcagtgccagcagcctggtggaagcggtcttgatttcagaaggactggggcagtttgctcaagatcccaagttcatcgaggtcaccacccaggagctggccgacgcctgcgacatgaccatagaggagatggagagcgcggccgacaacatcctcagcgggggcgccccacagagccccaatggcgccctcttaccctttgtgaactgcagggacgcggggcaggaccgagccgggggcgaggaggacgcgggctgtgtgcgcgcgcggggtgcaccgagtgaggaggagctccaggacagcagggtctacgtcagcagcctgtagtgggcgctgccagatgcgggcttttttttttttatttgtttcaatgttcctaatgggttcgtttcagaagtgcctcactgttctcgtgacctggagttaaccggaacagcgtcttcattcatttctgttgggaccagacgcggagcctgggtgcgcgagccgccctccgggaggaaggcgcccggctgcgtctgcagaggcggggagaggaggcggcgagggtcccggggcgcgaggaaggcgcctgccctctcccagctcgcaggccccgggcccggccgcgcctctgcggggagagcaccccggcttcccgcgcgccctcaccaaaaggaccctacagcaaacgggtgtctttcgactctgcttgtagaaaccatttgcacatattctgtacgagcctcgctgtctccctagagccagggccctgcggatttggagaagggagcggggcaggacttccaggaggaccccaacccggcccggagagggaggaggaggcctccaggggcgcggagctctggggatgggcgtcgggccggcagtggtgcggctcactccgtccctgcccacctgcgacgggatcccccgaccggcacgggccacgccgagctcccggccagccgccggcccgcaggcagcgcgagggaggagctgcgccgccgggaaggggccgccggctccgcccaaccaggtggtgctgagcttccgctgagcgctcttttgttttgtggtttgacacttttcttgacagcatgttgcagtttcttttcggttttggttttttttaaatgttttattttgctttcccagcgggaggggaggaagaagagtgtttacaaagtcctgtagccccctcacctttctgttttcacttttgccaatgtacatcgggtttggttttcttgtattatttaaacggttgtggtttcctttttccacggaggttcaatagaagccgctgcaggagagttttaccaaccattgtgtatgcccaataatttgttatcatttccttaggtagtaacctatttttgttctggtttggttcggttatctaatggaaaggtaactggcaatgcacttgatgtggtcttgcacatgtgggtgatagagttgggttcctttttatgctgggtgtacaggtgggtttgggagagaggagcatgcgcgagagagtctccgagtgtgtgcgacgcgtgtgtgtgtggtgggttgtctgtgtgcatatgtcctgcccgtgtatatgcacccacaccatgtgcccgtgcacaccagtgactacgcagtcccccctttctggtttagctgtgggaagatctgaatctggggccgtttgaaagcaaaaacaaaccactgtctctgcttctgaaacgggaatcagtaactctttgcattttctgtcccacaagatatgcaaaaacaatgcaataatattcatttaaaaatacaattgtgagttgtgttggcattaaaactgtattttaaaaaaagacagaaatttaagggaaaaacacaagaaggcattttgcttcaatatattccgtgtaatgttttattgcattgataatgtttctgttgaagaaaccgttatacttgaattcaggtcagtttcagtatttttcaaatatttttttaaaactgaattgcaattgtgccaagcgaatataatgaattgaattaagttggttttcggattcacttcttgtatattttgctgcatgtaaagtaaatcattttgtatttggagtgtgacaagcttt

SEQ ID NO: 28 - DNA, 1733 bp, Homo sapiens
cagctcctgccagagcggcgctcggcgcggcgcggcgggcccggagcggcggcggcggctcttcctgcctccgcgcccaggagttgccggctccctttgacagcagagagccgggcaggggcctcaggaggactcgctgggagtgggcagaggcgcctcggcccctgccggcccaggcgggccccgcgcgccccccgcccctcctctccgcctcttctcgccctgcctctcccgatttattttttcaaatggtgtagccgccggaggtgcggtgctcagttcttggaaggggcccggatgtactgaggatgcgttacagtttcactcgaggaggcagtagtggaaaggagcagtttttggggtttgatgccataatgggaatcaggtaatcgtcggcggggaagaagaaacgctgcagaccacggcttcctcgaatcttgcgcgaaagccgccggcctcggaggagggattaatccagacccgccggggggtgttttcacatttcttcctcttcgtggctgctcctcctattaaaaccatttttggtccatggtcaatgagaatacgaggatgtacattccagaggaaaaccaccaaggttccaactatgggagcccacgccccgcccatgccaacatgaatgccaatgcggcagcggggctggcccctgagcacatccccaccccgggggctgccctgtcgtggcaggcggccatcgacgcagcccggcaggctaagctgatgggcagcgctggcaatgcgaccatctccacagtcagctccacgcagcggaagcggcagcaatatgggaaacccaagaagcagggcagcaccacggccacacgcccgccccgagccctgctctgcctgaccctgaagaaccccatccggagggcctgcatcagcattgtcgaatggaaaccatttgaaataattattttactgactatttttgccaattgtgtggccttagcgatctatattccctttccagaagatgattccaacgccaccaattccaacctggaacgagtggaatatctctttctcataatttttacggtggaagcgtttttaaaagtaatcgcctatggactcctctttcaccccaatgcctacctccgcaacggctggaacctactagattttataattgtggttgtggggtaagtatcactgtctgtttctttccctttatcttaccagtgttgcgggacttttccttaagtcagctgaagacagggtcgttgtcagacggccacaaagatttaggctcgcagatgatctagagtgagaaaaatgagatttattttgctaaaaggaacagaaagggaaagagagactcagcaaagtgagagagtgcgcttcctgcccatgggcttcccgcctcgcaggttgaatccaaggttctacccaggaaaaggaggggtcaggcttctccctgctgcagttggtggcgtgaacttccgtggttccaccctagtgtgcactcctcccagtgcgcaggctggctggagtttctctggggacccctccccacctggctgtctcaccagtacatccctcttcttccttctgtgttatctcttttcaatttggtcctaactatgctgggcttcaggcaagaagaaaggatctgtgaaaatcactttgaattcagacttccccagagggacaggggctatgacccaagagcacccctctccaccactcccacacagcatgcacacacg

SEQ ID NO: 29 - DNA, 1953 bp, Homo sapiens
cagctcctgccagagcggcgctcggcgcggcgcggcgggcccggagcggcggcggcggctcttcctgcctccgcgcccaggagttgccggctccctttgacagcagagagccgggcaggggcctcaggaggactcgctgggagtgggcagaggcgcctcggcccctgccggcccaggcgggccccgcgcgccccccgcccctcctctccgcctcttctcgccctgcctctcccgatttattttttcaaatggtgtagccgccggaggtgcggtgctcagttcttggaaggggcccggatgtactgaggatgcgttacagtttcactcgaggaggcagtagtggaaaggagcagtttttggggtttgatgccataatgggaatcaggtaatcgtcggcggggaagaagaaacgctgcagaccacggcttcctcgaatcttgcgcgaaagccgccggcctcggaggagggattaatccagacccgccggggggtgttttcacatttcttcctcttcgtggctgctcctcctattaaaaccatttttggtccatggtcaatgagaatacgaggatgtacattccagaggaaaaccaccaaggttccaactatgggagcccacgccccgcccatgccaacatgaatgccaatgcggcagcggggctggcccctgagcacatccccaccccgggggctgccctgtcgtggcaggcggccatcgacgcagcccggcaggctaagctgatgggcagcgctggcaatgcgaccatctccacagtcagctccacgcagcggaagcggcagcaatatgggaaacccaagaagcagggcagcaccacggccacacgcccgccccgagccctgctctgcctgaccctgaagaaccccatccggagggcctgcatcagcattgtcgaatggaaaccatttgaaataattattttactgactatttttgccaattgtgtggccttagcgatctatattccctttccagaagatgattccaacgccaccaattccaacctggaacgagtggaatatctctttctcataatttttacggtggaagcgtttttaaaagtaatcgcctatggactcctctttcaccccaatgcctacctccgcaacggctggaacctactagattttataattgtggttgtggggctttttagtgcaattttagaacaagcaaccaaagcagatggggcaaacgctctcggagggaaaggggccggatttgatgtgaaggcgctgagggccttccgcgtgctgcgccccctgcggctggtgtccggagtcccaagtctccaggtggtcctgaattccatcatcaaggccatggtccccctgctgcacatcgccctgcttgtgctgtttgtcatcatcatctacgccatcatcggcttggagctcttcatggggaagatgcacaagacctgctacaaccaggagggcatagcagatgttccagcagaagatgacccttccccttgtgcgctggaaacgggccacgggcggcagtgccagaacggcacggtgtgcaagcccggctgggatggtcccaagcacggcatcaccaactttgacaactttgccttcgccatgctcacggtgttccagtgcatcaccatggagggctggacggacgtgctgtactgggtcaatgatgccgtaggaagggactggccctggatctattttgttacactaatcatcatagggtcattttttgtacttaacttggttctcggtgtgcttagcgggtaagcaggaccaaggaaaaaggtcttgatttttccatttatttttatttattctttctgctattcctggctgtattctttttctggctctgatgaacctgggataaggggtcaccacaggagccttgaagtggatgtccttgtcctggctgggtaaagggtcagatgtgccactggtcttggtggt

SEQ ID NO: 30 - DNA, 8858 bp, Homo sapiens
cagctcctgccagagcggcgctcggcgcggcgcggcgggcccggagcggcggcggcggctcttcctgcctccgcgcccaggagttgccggctccctttgacagcagagagccgggcaggggcctcaggaggactcgctgggagtgggcagaggcgcctcggcccctgccggcccaggcgggccccgcgcgccccccgcccctcctctccgcctcttctcgccctgcctctcccgatttattttttcaaatggtgtagccgccggaggtgcggtgctcagttcttggaaggggcccggatgtactgaggatgcgttacagtttcactcgaggaggcagtagtggaaaggagcagtttttggggtttgatgccataatgggaatcaggtaatcgtcggcggggaagaagaaacgctgcagaccacggcttcctcgaatcttgcgcgaaagccgccggcctcggaggagggattaatccagacccgccggggggtgttttcacatttcttcctcttcgtggctgctcctcctattaaaaccatttttggtccatggtcaatgagaatacgaggatgtacattccagaggaaaaccaccaaggttccaactatgggagcccacgccccgcccatgccaacatgaatgccaatgcggcagcggggctggcccctgagcacatccccaccccgggggctgccctgtcgtggcaggcggccatcgacgcagcccggcaggctaagctgatgggcagcgctggcaatgcgaccatctccacagtcagctccacgcagcggaagcggcagcaatatgggaaacccaagaagcagggcagcaccacggccacacgcccgccccgagccctgctctgcctgaccctgaagaaccccatccggagggcctgcatcagcattgtcgaatggaaaccatttgaaataattattttactgactatttttgccaattgtgtggccttagcgatctatattccctttccagaagatgattccaacgccaccaattccaacctggaacgagtggaatatctctttctcataatttttacggtggaagcgtttttaaaagtaatcgcctatggactcctctttcaccccaatgcctacctccgcaacggctggaacctactagattttataattgtggttgtggggctttttagtgcaattttagaacaagcaaccaaagcagatggggcaaacgctctcggagggaaaggggccggatttgatgtgaaggcgctgagggccttccgcgtgctgcgccccctgcggctggtgtccggagtcccaagtctccaggtggtcctgaattccatcatcaaggccatggtccccctgctgcacatcgccctgcttgtgctgtttgtcatcatcatctacgccatcatcggcttggagctcttcatggggaagatgcacaagacctgctacaaccaggagggcatagcagatgttccagcagaagatgacccttccccttgtgcgctggaaacgggccacgggcggcagtgccagaacggcacggtgtgcaagcccggctgggatggtcccaagcacggcatcaccaactttgacaactttgccttcgccatgctcacggtgttccagtgcatcaccatggagggctggacggacgtgctgtactgggtcaatgatgccgtaggaagggactggccctggatctattttgttacactaatcatcatagggtcattttttgtacttaacttggttctcggtgtgcttagcggagagttttccaaagagagggagaaggccaaggcccggggagatttccagaagctgcgggagaagcagcagctagaagaggatctcaaaggctacctggattggatcactcaggccgaagacatcgatcctgagaatgaggacgaaggcatggatgaggagaagccccgaaacagaggcactccggcgggcatgcttgatcagaagaaagggaagtttgcttggtttagtcactccacagaaacccatgtgagcatgcccaccagtgagaccgagtccgtcaacaccgaaaacgtggctggaggtgacatcgagggagaaaactgcggggccaggctggcccaccggatctccaagtcaaagttcagccgctactggcgccggtggaatcggttctgcagaaggaagtgccgcgccgcagtcaagtctaatgtcttctactggctggtgattttcctggtgttcctcaacacgctcaccattgcctctgagcactacaaccagcccaactggctcacagaagtccaagacacggcaaacaaggccctgctggccctgttcacggcagagatgctcctgaagatgtacagcctgggcctgcaggcctacttcgtgtccctcttcaaccgctttgactgcttcgtcgtgtgtggcggcatcctggagaccatcctggtggagaccaagatcatgtccccactgggcatctccgtgctcagatgcgtccggctgctgaggattttcaagatcacgaggtactggaactccttgagcaacctggtggcatccttgctgaactctgtgcgctccatcgcctccctgctccttctcctcttcctcttcatcatcatcttctccctcctggggatgcagctctttggaggaaagttcaactttgatgagatgcagacccggaggagcacattcgataacttcccccagtccctcctcactgtgtttcagatcctgaccggggaggactggaattcggtgatgtatgatgggatcatggcttatggcggcccctcttttccagggatgttagtctgtatttacttcatcatcctcttcatctgtggaaactatatcctactgaatgtgttcttggccattgctgtggacaacctggctgatgctgagagcctcacatctgcccaaaaggaggaggaagaggagaaggagagaaagaagctggccaggactgccagcccagagaagaaacaagagttggtggagaagccggcagtgggggaatccaaggaggagaagattgagctgaaatccatcacggctgacggagagtctccacccgccaccaagatcaacatggatgacctccagcccaatgaaaatgaggataagagcccctaccccaacccagaaactacaggagaagaggatgaggaggagccagagatgcctgtcggccctcgcccacgaccactctctgagcttcaccttaaggaaaaggcagtgcccatgccagaagccagcgcgtttttcatcttcagctctaacaacaggtttcgcctccagtgccaccgcattgtcaatgacacgatcttcaccaacctgatcctcttcttcattctgctcagcagcatttccctggctgctgaggacccggtccagcacacctccttcaggaaccatattctgttttattttgatattgtttttaccaccattttcaccattgaaattgctctgaagatgactgcttatggggctttcttgcacaagggttctttctgccggaactacttcaacatcctggacctgctggtggtcagcgtgtccctcatctcctttggcatccagtccagtgcaatcaatgtcgtgaagatcttgcgagtcctgcgagtactcaggcccctgagggccatcaacagggccaaggggctaaagcatgtggttcagtgtgtgtttgtcgccatccggaccatcgggaacatcgtgattgtcaccaccctgctgcagttcatgtttgcctgcatcggggtccagctcttcaagggaaagctgtacacctgttcagacagttccaagcagacagaggcggaatgcaagggcaactacatcacgtacaaagacggggaggttgaccaccccatcatccaaccccgcagctgggagaacagcaagtttgactttgacaatgttctggcagccatgatggccctcttcaccgtctccaccttcgaagggtggccagagctgctgtaccgctccatcgactcccacacggaagacaagggccccatctacaactaccgtgtggagatctccatcttcttcatcatctacatcatcatcatcgccttcttcatgatgaacatcttcgtgggcttcgtcatcgtcacctttcaggagcagggggagcaggagtacaagaactgtgagctggacaagaaccagcgacagtgcgtggaatacgccctcaaggcccggcccctgcggaggtacatccccaagaaccagcaccagtacaaagtgtggtacgtggtcaactccacctacttcgagtacctgatgttcgtcctcatcctgctcaacaccatctgcctggccatgcagcactacggccagagctgcctgttcaaaatcgccatgaacatcctcaacatgctcttcactggcctcttcaccgtggagatgatcctgaagctcattgccttcaaacccaagcactatttctgtgatgcatggaatacatttgacgccttgattgttgtgggtagcattgttgatatagcaatcaccgaggtaaacccagctgaacatacccaatgctctccctctatgaacgcagaggaaaactcccgcatctccatcaccttcttccgcctgttccgggtcatgcgtctggtgaagctgctgagccgtggggagggcatccggacgctgctgtggaccttcatcaagtccttccaggccctgccctatgtggccctcctgatcgtgatgctgttcttcatctacgcggtgatcgggatgcaggtgtttgggaaaattgccctgaatgataccacagagatcaaccggaacaacaactttcagaccttcccccaggccgtgctgctcctcttcaggtgtgccaccggggaggcctggcaggacatcatgctggcctgcatgccaggcaagaagtgtgccccagagtccgagcccagcaacagcacggagggtgaaacaccctgtggtagcagctttgctgtcttctacttcatcagcttctacatgctctgtgccttcctgatcatcaacctctttgtagctgtcatcatggacaactttgactacctgacaagggactggtccatccttggtccccaccacctggatgagtttaaaagaatctgggcagagtatgaccctgaagccaagggtcgtatcaaacacctggatgtggtgaccctcctccggcggattcagccgccactaggttttgggaagctgtgccctcaccgcgtggcttgcaaacgcctggtctccatgaacatgcctctgaacagcgacgggacagtcatgttcaatgccaccctgtttgccctggtcaggacggccctgaggatcaaaacagaagagggacccagcccatcagaggcccaccaaggggctgaggatcctttccgccctgcagggaacctagaacaagccaatgaggagctgcgggcgatcatcaagaagatctggaagcggaccagcatgaagctgctggaccaggtggtgccccctgcaggtgatgatgaggtcaccgttggcaagttctacgccacgttcctgatccaggagtacttccggaagttcaagaagcgcaaagagcagggccttgtgggcaagccctcccagaggaacgcgctgtctctgcaggctggcttgcgcacactgcatgacatcgggcctgagatccgacgggccatctctggagatctcaccgctgaggaggagctggacaaggccatgaaggaggctgtgtccgctgcttctgaagatgacatcttcaggagggccggtggcctgttcggcaaccacgtcagctactaccaaagcgacggccggagcgccttcccccagaccttcaccactcagcgcccgctgcacatcaacaaggcgggcagcagccagggcgacactgagtcgccatcccacgagaagctggtggactccaccttcaccccgagcagctactcgtccaccggctccaacgccaacatcaacaacgccaacaacaccgccctgggtcgcctccctcgccccgccggctaccccagcacggtcagcactgtggagggccacgggccccccttgtcccctgccatccgggtgcaggaggtggcgtggaagctcagctccaacaggtgccactcccgggagagccaggcagccatggcgggtcaggaggagacgtctcaggatgagacctatgaagtgaagatgaaccatgacacggaggcctgcagtgagcccagcctgctctccacagagatgctctcctaccaggatgacgaaaatcggcaactgacgctcccagaggaggacaagagggacatccggcaatctccgaagaggggtttcctccgctctgcctcactaggtcgaagggcctccttccacctggaatgtctgaagcgacagaaggaccgagggggagacatctctcagaagacagtcctgcccttgcatctggttcatcatcaggcattggcagtggcaggcctgagccccctcctccagagaagccattcccctgcctcattccctaggccttttgccaccccaccagccacacctggcagccgaggctggcccccacagcccgtccccaccctgcggcttgagggggtcgagtccagtgagaaactcaacagcagcttcccatccatccactgcggctcctgggctgagaccacccccggtggcgggggcagcagcgccgcccggagagtccggcccgtctccctcatggtgcccagccaggctggggccccagggaggcagttccacggcagtgccagcagcctggtggaagcggtcttgatttcagaaggactggggcagtttgctcaagatcccaagttcatcgaggtcaccacccaggagctggccgacgcctgcgacatgaccatagaggagatggagagcgcggccgacaacatcctcagcgggggcgccccacagagccccaatggcgccctcttaccctttgtgaactgcagggacgcggggcaggaccgagccgggggcgaggaggacgcgggctgtgtgcgcgcgcggggtgcaccgagtgaggaggagctccaggacagcagggtctacgtcagcagcctgtagtgggcgctgccagatgcgggcttttttttttttatttgtttcaatgttcctaatgggttcgtttcagaagtgcctcactgttctcgtgacctggagttaaccggaacagcgtcttcattcatttctgttgggaccagacgcggagcctgggtgcgcgagccgccctccgggaggaaggcgcccggctgcgtctgcagaggcggggagaggaggcggcgagggtcccggggcgcgaggaaggcgcctgccctctcccagctcgcaggccccgggcccggccgcgcctctgcggggagagcaccccggcttcccgcgcgccctcaccaaaaggaccctacagcaaacgggtgtctttcgactctgcttgtagaaaccatttgcacatattctgtacgagcctcgctgtctccctagagccagggccctgcggatttggagaagggagcggggcaggacttccaggaggaccccaacccggcccggagagggaggaggaggcctccaggggcgcggagctctggggatgggcgtcgggccggcagtggtgcggctcactccgtccctgcccacctgcgacgggatcccccgaccggcacgggccacgccgagctcccggccagccgccggcccgcaggcagcgcgagggaggagctgcgccgccgggaaggggccgccggctccgcccaaccaggtggtgctgagcttccgctgagcgctcttttgttttgtggtttgacacttttcttgacagcatgttgcagtttcttttcggttttggttttttttaaatgttttattttgctttcccagcgggaggggaggaagaagagtgtttacaaagtcctgtagccccctcacctttctgttttcacttttgccaatgtacatcgggtttggttttcttgtattatttaaacggttgtggtttcctttttccacggaggttcaatagaagccgctgcaggagagttttaccaaccattgtgtatgcccaataatttgttatcatttccttaggtagtaacctatttttgttctggtttggttcggttatctaatggaaaggtaactggcaatgcacttgatgtggtcttgcacatgtgggtgatagagttgggttcctttttatgctgggtgtacaggtgggtttgggagagaggagcatgcgcgagagagtctccgagtgtgtgcgacgcgtgtgtgtgtggtgggttgtctgtgtgcatatgtcctgcccgtgtatatgcacccacaccatgtgcccgtgcacaccagtgactacgcagtcccccctttctggtttagctgtgggaagatctgaatctggggccgtttgaaagcaaaaacaaaccactgtctctgcttctgaaacgggaatcagtaactctttgcattttctgtcccacaagatatgcaaaaacaatgcaataatattcatttaaaaatacaattgtgagttgtgttggcattaaaactgtattttaaaaaaagacagaaatttaagggaaaaacacaagaaggcattttgcttcaatatattccgtgtaatgttttattgcattgataatgtttctgttgaagaaaccgttatacttgaattcaggtcagtttcagtatttttcaaatatttttttaaaactgaattgcaattgtgccaagcgaatataatgaattgaattaagttggttttcggattcacttcttgtatattttgctgcatgtaaagtaaatcattttgtatttggagtgtgacaagcttt

SEQ ID NO: 31 - DNA, 7576 bp, Homo sapiens
cagctcctgccagagcggcgctcggcgcggcgcggcgggcccggagcggcggcggcggctcttcctgcctccgcgcccaggagttgccggctccctttgacagcagagagccgggcaggggcctcaggaggactcgctgggagtgggcagaggcgcctcggcccctgccggcccaggcgggccccgcgcgccccccgcccctcctctccgcctcttctcgccctgcctctcccgatttattttttcaaatggtgtagccgccggaggtgcggtgctcagttcttggaaggggcccggatgtactgaggatgcgttacagtttcactcgaggaggcagtagtggaaaggagcagtttttggggtttgatgccataatgggaatcaggtaatcgtcggcggggaagaagaaacgctgcagaccacggcttcctcgaatcttgcgcgaaagccgccggcctcggaggagggattaatccagacccgccggggggtgttttcacatttcttcctcttcgtggctgctcctcctattaaaaccatttttggtccatggtcaatgagaatacgaggatgtacattccagaggaaaaccaccaaggttccaactatgggagcccacgccccgcccatgccaacatgaatgccaatgcggcagcggggctggcccctgagcacatccccaccccgggggctgccctgtcgtggcaggcggccatcgacgcagcccggcaggctaagctgatgggcagcgctggcaatgcgaccatctccacagtcagctccacgcagcggaagcggcagcaatatgggaaacccaagaagcagggcagcaccacggccacacgcccgccccgagccctgctctgcctgaccctgaagaaccccatccggagggcctgcatcagcattgtcgaatggaaaccatttgaaataattattttactgactatttttgccaattgtgtggccttagcgatctatattccctttccagaagatgattccaacgccaccaattccaacctggaacgagtggaatatctctttctcataatttttacggtggaagcgtttttaaaagtaatcgcctatggactcctctttcaccccaatgcctacctccgcaacggctggaacctactagattttataattgtggttgtggggctttttagtgcaattttagaacaagcaaccaaagcagatggggcaaacgctctcggagggaaaggggccggatttgatgtgaaggcgctgagggccttccgcgtgctgcgccccctgcggctggtgtccggagtcccaagtctccaggtggtcctgaattccatcatcaaggccatggtccccctgctgcacatcgccctgcttgtgctgtttgtcatcatcatctacgccatcatcggcttggagctcttcatggggaagatgcacaagacctgctacaaccaggagggcatagcagatgttccagcagaagatgacccttccccttgtgcgctggaaacgggccacgggcggcagtgccagaacggcacggtgtgcaagcccggctgggatggtcccaagcacggcatcaccaactttgacaactttgccttcgccatgctcacggtgttccagtgcatcaccatggagggctggacggacgtgctgtactgggtcaatgatgccgtaggaagggactggccctggatctattttgttacactaatcatcatagggtcattttttgtacttaacttggttctcggtgtgcttagcggagagttttccaaagagagggagaaggccaaggcccggggagatttccagaagctgcgggagaagcagcagctagaagaggatctcaaaggctacctggattggatcactcaggccgaagacatcgatcctgagaatgaggacgaaggcatggatgaggagaagccccgaaacagaggcactccggcgggcatgcttgatcagaagaaagggaagtttgcttggtttagtcactccacagaaacccatgtgagcatgcccaccagtgagaccgagtccgtcaacaccgaaaacgtggctggaggtgacatcgagggagaaaactgcggggccaggctggcccaccggatctccaagtcaaagttcagccgctactggcgccggtggaatcggttctgcagaaggaagtgccgcgccgcagtcaagtctaatgtcttctactggctggtgattttcctggtgttcctcaacacgctcaccattgcctctgagcactacaaccagcccaactggctcacagaagtccaagacacggcaaacaaggccctgctggccctgttcacggcagagatgctcctgaagatgtacagcctgggcctgcaggcctacttcgtgtccctcttcaaccgctttgactgcttcgtcgtgtgtggcggcatcctggagaccatcctggtggagaccaagatcatgtccccactgggcatctccgtgctcagatgcgtccggctgctgaggattttcaagatcacgaggtactggaactccttgagcaacctggtggcatccttgctgaactctgtgcgctccatcgcctccctgctccttctcctcttcctcttcatcatcatcttctccctcctggggatgcagctctttggaggaaagttcaactttgatgagatgcagacccggaggagcacattcgataacttcccccagtccctcctcactgtgtttcagatcctgaccggggaggactggaattcggtgatgtatgatgggatcatggcttatggcggcccctcttttccagggatgttagtctgtatttacttcatcatcctcttcatctgtggaaactatatcctactgaatgtgttcttggccattgctgtggacaacctggctgatgctgagagcctcacatctgcccaaaaggaggaggaagaggagaaggagagaaagaagctggccaggactgccagcccagagaagaaacaagagttggtggagaagccggcagtgggggaatccaaggaggagaagattgagctgaaatccatcacggctgacggagagtctccacccgccaccaagatcaacatggatgacctccagcccaatgaaaatgaggataagagcccctaccccaacccagaaactacaggagaagaggatgaggaggagccagagatgcctgtcggccctcgcccacgaccactctctgagcttcaccttaaggaaaaggcagtgcccatgccagaagccagcgcgtttttcatcttcagctctaacaacaggtttcgcctccagtgccaccgcattgtcaatgacacgatcttcaccaacctgatcctcttcttcattctgctcagcagcatttccctggctgctgaggacccggtccagcacacctccttcaggaaccatattctgttttattttgatattgtttttaccaccattttcaccattgaaattgctctgaagatgactgcttatggggctttcttgcacaagggttctttctgccggaactacttcaacatcctggacctgctggtggtcagcgtgtccctcatctcctttggcatccagtccagtgcaatcaatgtcgtgaagatcttgcgagtcctgcgagtactcaggcccctgagggccatcaacagggccaaggggctaaagcatgtggttcagtgtgtgtttgtcgccatccggaccatcgggaacatcgtgattgtcaccaccctgctgcagttcatgtttgcctgcatcggggtccagctcttcaagggaaagctgtacacctgttcagacagttccaagcagacagaggcggaatgcaagggcaactacatcacgtacaaagacggggaggttgaccaccccatcatccaaccccgcagctgggagaacagcaagtttgactttgacaatgttctggcagccatgatggccctcttcaccgtctccaccttcgaagggtggccagagctgctgtaccgctccatcgactcccacacggaagacaagggccccatctacaactaccgtgtggagatctccatcttcttcatcatctacatcatcatcatcgccttcttcatgatgaacatcttcgtgggcttcgtcatcgtcacctttcaggagcagggggagcaggagtacaagaactgtgagctggacaagaaccagcgacagtgcgtggaatacgccctcaaggcccggcccctgcggaggtacatccccaagaaccagcaccagtacaaagtgtggtacgtggtcaactccacctacttcgagtacctgatgttcgtcctcatcctgctcaacaccatctgcctggccatgcagcactacggccagagctgcctgttcaaaatcgccatgaacatcctcaacatgctcttcactggcctcttcaccgtggagatgatcctgaagctcattgccttcaaacccaagcactatttctgtgatgcatggaatacatttgacgccttgattgttgtgggtagcattgttgatatagcaatcaccgaggtaaacccagctgaacatacccaatgctctccctctatgaacgcagaggaaaactcccgcatctccatcaccttcttccgcctgttccgggtcatgcgtctggtgaagctgctgagccgtggggagggcatccggacgctgctgtggaccttcatcaagtccttccaggccctgccctatgtggccctcctgatcgtgatgctgttcttcatctacgcggtgatcgggatgcaggtgtttgggaaaattgccctgaatgataccacagagatcaaccggaacaacaactttcagaccttcccccaggccgtgctgctcctcttcaggtgtgccaccggggaggcctggcaggacatcatgctggcctgcatgccaggcaagaagtgtgccccagagtccgagcccagcaacagcacggagggtgaaacaccctgtggtagcagctttgctgtcttctacttcatcagcttctacatgctctgtgccttcctgatcatcaacctctttgtagctgtcatcatggacaactttgactacctgacaagggactggtccatccttggtccccaccacctggatgagtttaaaagaatctgggcagagtatgaccctgaagccaagggtcgtatcaaacacctggatgtggtgaccctcctccggcggattcagccgccactaggttttgggaagctgtgccctcaccgcgtggcttgcaaacgcctggtctccatgaacatgcctctgaacagcgacgggacagtcatgttcaatgccaccctgtttgccctggtcaggacggccctgaggatcaaaacagaagagggacccagcccatcagaggcccaccaaggggctgaggatcctttccgccctgcagggaacctagaacaagccaatgaggagctgcgggcgatcatcaagaagatctggaagcggaccagcatgaagctgctggaccaggtggtgccccctgcaggtgatgatgaggtcaccgttggcaagttctacgccacgttcctgatccaggagtacttccggaagttcaagaagcgcaaagagcagggccttgtgggcaagccctcccagaggaacgcgctgtctctgcaggctggcttgcgcacactgcatgacatcgggcctgagatccgacgggccatctctggagatctcaccgctgaggaggagctggacaaggccatgaaggaggctgtgtccgctgcttctgaagatgacatcttcaggagggccggtggcctgttcggcaaccacgtcagctactaccaaagcgacggccggagcgccttcccccagaccttcaccactcagcgcccgctgcacatcaacaaggcgggcagcagccagggcgacactgagtcgccatcccacgagaagctggtggactccaccttcaccccgagcagctactcgtccaccggctccaacgccaacatcaacaacgccaacaacaccgccctgggtcgcctccctcgccccgccggctaccccagcacggtcagcactgtggagggccacgggccccccttgtcccctgccatccgggtgcaggaggtggcgtggaagctcagctccaacaggtgccactcccgggagagccaggcagccatggcgggtcaggaggagacgtctcaggatgagacctatgaagtgaagatgaaccatgacacggaggcctgcagtgagcccagcctgctctccacagagatgctctcctaccaggatgacgaaaatcggcaactgacgctcccagaggaggacaagagggacatccggcaatctccgaagaggggtttcctccgctctgcctcactaggtcgaagggcctccttccacctggaatgtctgaagcgacagaaggaccgagggggagacatctctcagaagacagtcctgcccttgcatctggttcatcatcaggcattggcagtggcaggcctgagccccctcctccagagaagccattcccctgcctcattccctaggccttttgccaccccaccagccacacctggcagccgaggctggcccccacagcccgtccccaccctgcggcttgagggggtcgagtccagtgagaaactcaacagcagcttcccatccatccactgcggctcctgggctgagaccacccccggtggcgggggcagcagcgccgcccggagagtccggcccgtctccctcatggtgcccagccaggctggggccccagggaggcagttccacggcagtgccagcagcctggtggaagcggtaggtgactcgcagatgggcaggggggagaggccacgggcaacaaggggacttggcatgcggggctgagaagggagcacctggctcttgccaaattcattgcagtcaatatctgagcccgaaagaccctccctctcagggctgcaggagggctcgtgtgcggaaagccatgactgcacaagatgctatgggctctcttgaggctaggcccactgcagagggcggcagaaaccactgagcaacttatcccttatactgcagctgctcgacatgcaaatgtgagcctggctgcctttatacacagacaggcaagatccaaggtgctcaggcctgactgcccgtgagcatcacctggggagctttggaaacccgggacagattaactgatgattgttaaagctctttgatgattttaacgtgtagcaaggttgagagccactagcctagaacaagcgagctttcagtcccactgtgctctgcctggtcagagcatctagtgcaatcccggcaccacattattagggacctttgacacactggaacaaacccaacagaggatgaccaggatggcaaggttcctagaaaccatttcctaggagaaccatttcagggaattcgggaagaaaacctggagaggaggtgactttggagggtgcgatacacctctcacacctgcaacgggtgggatggggaaagggtggcaggctcagcccaccagcggacagatttcagctcacatggggaagaccttcccaaatgagctcttccaagatgagag

SEQ ID NO: 32 - DNA, 8700 bp, Homo sapiens
gatcagccaagcaggctgctgagaaagatgacctgaattgcagggatgcagaaagtgctgaagatgctttgtcagctgagaactggttaagagaaagtggctgatacagcaaccccgttcagtgtctgcttttgtggggagccctctgctcagaaaactgctcttcttggcacccacttttctccctcctgtctctgggccacccttcttctttccactgggtgggccatggatgcatggacttcagatagctcggacccctgggtgctgacgagatgggaccctcgggacccctggaggactcgcagtgctgaccactagccgcgtcgcctgagccccagcgctgatgcgatacagtttccccctcactgtgctggagggagaagaccctgggatttctgagcgaggcccgtggatgttgaagtcttcctgggtccccgactccatgctctcgcgccccagttactatgacgccctgcacaaccgcagctcggggcacgcccagcgccctgcaggacactcggcctccccggctcagcatctgcttcgagggcccccctctgaggcggcggggcggcgtggtggatcaccgagatgtcatcttggcccaccaggcccacaaaatccacagcaccccccaggccaggaggaaagaatgggaccaccatcatagcgaattgcatcgtcctcgcactggagcagcatctgcctgatgatgacaagaccccgatgtctgaacggctggatgacacagaaccatacttcattggaattttttgtttcgaggctggaattaaaatcattgcccttgggtttgccttccacaaaggctcctacttgaggaatggctggaatgtcatggactttgtggtggtgctaacgggcatcttggcgacagttgggacggagtttgacctacggacgctgagggcagttcgagtgctgcggccgctcaagctggtgtctggaatcccaagtttacaagtcgtcctgaagtcgatcatgaaggcgatgatccctttgctgcagatcggcctcctcctattttttgcaatccttatttttgcaatcatagggttagaattttatatgggaaaatttcataccacctgctttgaagaggggacagatgacattcagggtgagtctccggctccatgtgggacagaagagcccgcccgcacctgccccaatgggaccaaatgtcagccctactgggaagggcccaacaacgggatcactcagttcgacaacatcctgtttgcagtgctgactgttttccagtgcataaccatggaagggtggactgatctcctctacaatagcaacgatgcctcagggaacacttggaactggttgtacttcatccccctcatcatcatcggctccttttttatgctgaaccttgtgctgggtgtgctgtcaggggagtttgccaaagaaagggaacgggtggagaaccggcgggcttttctgaagctgaggcggcaacaacagattgaacgtgagctcaatgggtacatggaatggatctcaaaagcagaagaggtgatcctcgccgaggatgaaactgacggggagcagaggcatccctttgatggagctctgcggagaaccaccataaagaaaagcaagacagatttgctcaaccccgaagaggctgaggatcagctggctgatatagcctctgtgggttctcccttcgcccgagccagcattaaaagtgccaagctggagaactcgaccttttttcacaaaaaggagaggaggatgcgtttctacatccgccgcatggtcaaaactcaggccttctactggactgtactcagtttggtagctctcaacacgctgtgtgttgctattgttcactacaaccagcccgagtggctctccgacttcctttactatgcagaattcattttcttaggactctttatgtccgaaatgtttataaaaatgtacgggcttgggacgcggccttacttccactcttccttcaactgctttgactgtggggttatcattgggagcatcttcgaggtcatctgggctgtcataaaacctggcacatcctttggaatcagcgtgttacgagccctcaggttattgcgtattttcaaagtcacaaagtactgggcatctctcagaaacctggtcgtctctctcctcaactccatgaagtccatcatcagcctgttgtttctccttttcctgttcattgtcgtcttcgcccttttgggaatgcaactcttcggcggccagtttaatttcgatgaagggactcctcccaccaacttcgatacttttccagcagcaataatgacggtgtttcagatcctgacgggcgaagactggaacgaggtcatgtacgacgggatcaagtctcaggggggcgtgcagggcggcatggtgttctccatctatttcattgtactgacgctctttgggaactacaccctcctgaatgtgttcttggccatcgctgtggacaatctggccaacgcccaggagctcaccaaggacgagcaagaggaagaagaagcagcgaaccagaaacttgccctacagaaagccaaggaggtggcagaagtgagtcctctgtccgcggccaacatgtctatagctgtgaaagagcaacagaagaatcaaaagccagccaagtccgtgtgggagcagcggaccagtgagatgcgaaagcagaacttgctggccagccgggaggccctgtataacgaaatggacccggacgagcgctggaaggctgcctacacgcggcacctgcggccagacatgaagacgcacttggaccggccgctggtggtggacccgcaggagaaccgcaacaacaacaccaacaagagccgggcggccgagcccaccgtggaccagcgcctcggccagcagcgcgccgaggacttcctcaggaaacaggcccgctaccacgatcgggcccgggaccccagcggctcggcgggcctggacgcacggaggccctgggcgggaagccaggaggccgagctgagccgggagggaccctacggccgcgagtcggaccaccacgcccgggagggcagcctggagcaacccgggttctgggagggcgaggccgagcgaggcaaggccggggacccccaccggaggcacgtgcaccggcaggggggcagcagggagagccgcagcgggtccccgcgcacgggcgcggacggggagcatcgacgtcatcgcgcgcaccgcaggcccggggaggagggtccggaggacaaggcggagcggagggcgcggcaccgcgagggcagccggccggcccggggcggcgagggcgagggcgagggccccgacgggggcgagcgcaggagaaggcaccggcatggcgctccagccacgtacgagggggacgcgcggagggaggacaaggagcggaggcatcggaggaggaaagagaaccagggctccggggtccctgtgtcgggccccaacctgtcaaccacccggccaatccagcaggacctgggccgccaagacccacccctggcagaggatattgacaacatgaagaacaacaagctggccaccgcggagtcggccgctccccacggcagccttggccacgccggcctgccccagagcccagccaagatgggaaacagcaccgaccccggccccatgctggccatccctgccatggccaccaacccccagaacgccgccagccgccggacgcccaacaacccggggaacccatccaatcccggcccccccaagacccccgagaatagccttatcgtcaccaaccccagcggcacccagaccaattcagctaagactgccaggaaacccgaccacaccacagtggacatccccccagcctgcccaccccccctcaaccacaccgtcgtacaagtgaacaaaaacgccaacccagacccactgccaaaaaaagaggaagagaagaaggaggaggaggaagacgaccgtggggaagacggccctaagccaatgcctccctatagctccatgttcatcctgtccacgaccaacccccttcgccgcctgtgccattacatcctgaacctgcgctactttgagatgtgcatcctcatggtcattgccatgagcagcatcgccctggccgccgaggaccctgtgcagcccaacgcacctcggaacaacgtgctgcgatactttgactacgtttttacaggcgtctttacctttgagatggtgatcaagatgattgacctggggctcgtcctgcatcagggtgcctacttccgtgacctctggaatattctcgacttcatagtggtcagtggggccctggtagcctttgccttcactggcaatagcaaaggaaaagacatcaacacgattaaatccctccgagtcctccgggtgctacgacctcttaaaaccatcaagcggctgccaaagctcaaggctgtgtttgactgtgtggtgaactcacttaaaaacgtcttcaacatcctcatcgtctacatgctattcatgttcatcttcgccgtggtggctgtgcagctcttcaaggggaaattcttccactgcactgacgagtccaaagagtttgagaaagattgtcgaggcaaatacctcctctacgagaagaatgaggtgaaggcgcgagaccgggagtggaagaagtatgaattccattacgacaatgtgctgtgggctctgctgaccctcttcaccgtgtccacgggagaaggctggccacaggtcctcaagcattcggtggacgccacctttgagaaccagggccccagccccgggtaccgcatggagatgtccattttctacgtcgtctactttgtggtgttccccttcttctttgtcaatatctttgtggccttgatcatcatcaccttccaggagcaaggggacaagatgatggaggaatacagcctggagaaaaatgagagggcctgcattgatttcgccatcagcgccaagccgctgacccgacacatgccgcagaacaagcagagcttccagtaccgcatgtggcagttcgtggtgtctccgcctttcgagtacacgatcatggccatgatcgccctcaacaccatcgtgcttatgatgaagttctatggggcttctgttgcttatgaaaatgccctgcgggtgttcaacatcgtcttcacctccctcttctctctggaatgtgtgctgaaagtcatggcttttgggattctgaattatttccgcgatgcctggaacatcttcgactttgtgactgttctgggcagcatcaccgatatcctcgtgactgagtttgggaataacttcatcaacctgagctttctccgcctcttccgagctgcccggctcatcaaacttctccgtcagggttacaccatccgcattcttctctggacctttgtgcagtccttcaaggccctgccttatgtctgtctgctgatcgccatgctcttcttcatctatgccatcattgggatgcaggtgtttggtaacattggcatcgacgtggaggacgaggacagtgatgaagatgagttccaaatcactgagcacaataacttccggaccttcttccaggccctcatgcttctcttccggagtgccaccggggaagcttggcacaacatcatgctttcctgcctcagcgggaaaccgtgtgataagaactctggcatcctgactcgagagtgtggcaatgaatttgcttatttttactttgtttccttcatcttcctctgctcgtttctgatgctgaatctctttgtcgccgtcatcatggacaactttgagtacctcacccgagactcctccatcctgggcccccaccacctggatgagtacgtgcgtgtctgggccgagtatgaccccgcagcttgcggtcggattcattataaggatatgtacagtttattacgagtaatatctccccctctcggcttaggcaagaaatgtcctcatagggttgcttgcaagcggcttctgcggatggacctgcccgtcgcagatgacaacaccgtccacttcaattccaccctcatggctctgatccgcacagccctggacatcaagattgccaagggaggagccgacaaacagcagatggacgctgagctgcggaaggagatgatggcgatttggcccaatctgtcccagaagacgctagacctgctggtcacacctcacaagtccacggacctcaccgtggggaagatctacgcagccatgatgatcatggagtactaccggcagagcaaggccaagaagctgcaggccatgcgcgaggagcaggaccggacacccctcatgttccagcgcatggagcccccgtccccaacgcaggaagggggacctggccagaacgccctcccctccacccagctggacccaggaggagccctgatggctcacgaaagcggcctcaaggagagcccgtcctgggtgacccagcgtgcccaggagatgttccagaagacgggcacatggagtccggaacaaggcccccctaccgacatgcccaacagccagcctaactctcagtccgtggagatgcgagagatgggcagagatggctactccgacagcgagcactacctccccatggaaggccagggccgggctgcctccatgccccgcctccctgcagagaaccagaggagaaggggccggccacgtgggaataacctcagtaccatctcagacaccagccccatgaagcgttcagcctccgtgctgggccccaaggcccgacgcctggacgattactcgctggagcgggtcccgcccgaggagaaccagcggcaccaccagcggcgccgcgaccgcagccaccgcgcctctgagcgctccctgggccgctacaccgatgtggacacaggcttggggacagacctgagcatgaccacccaatccggggacctgccgtcgaaggagcgggaccaggagcggggccggcccaaggatcggaagcatcgacagcaccaccaccaccaccaccaccaccaccatcccccgccccccgacaaggaccgctatgcccaggaacggccggaccacggccgggcacgggctcgggaccagcgctggtcccgctcgcccagcgagggccgagagcacatggcgcaccggcagggcagtagttccgtaagtggaagcccagccccctcaacatctggtaccagcactccgcggcggggccgccgccagctcccccagaccccctccaccccccggccacacgtgtcctattcccctgtgatccgtaaggccggcggctcggggccccgcagcagcagcagcagcagcagcagcagcagcagcaggcggtggccaggccgggccgggcggccaccagcggccctcggaggtacccaggccccacggccgagcctctggccggagatcggccgcccacggggggccacagcagcggccgctcgcccaggatggagaggcgggtcccaggcccggcccggagcgagtcccccagggcctgtcgacacggcggggcccggtggccggcatctggcccgcacgtgtccgaggggcccccgggtccccggcaccatggctactaccggggctccgactacgacgaggccgatggcccgggcagcgggggcggcgaggaggccatggccggggcctacgacgcgccaccccccgtacgacacgcgtcctcgggcgccaccgggcgctcgcccaggactccccgggcctcgggcccggcctgcgcctcgccttctcggcacggccggcgactccccaacggctactacccggcgcacggactggccaggccccgcgggccgggctccaggaagggcctgcacgaaccctacagcgagagtgacgatgattggtgctaagcccgggcgaggtggcgcccgcccggccccccacgcaccccacgcacacaccccacccgaggagccgcgcagaggccgcgggggcccagcacagagggcccgggagagggccagccgggagaccccagactctggagaggccagggctgggccacaagggtgtcccgcagagaccctcggccaaaagagaccctcctgggcagccacggcgccccccaaccagccccgatccccccacccacgacaggggctctcgggtgggaggcagggagcagacaaaccacacagccaagggatttgaattaactcagccatttttggagaactttggggaacatgaaaaaaaaaaaaaaaaaaaaaaaaaaacatttttaaaagaaaaaacggggagaaaaaaatagcttctattgatgagttttatcatctcaattgaatctttcctttccctgatgaagacagctggtggccgagtgcggcaaagaagccagaaggaaccagaatcccagtgccctacacccaccaccagacacactcacacccacacacgttctcagacacacacaagagtgcttgccggttataccaaaccctactattactgcctgcagaaatcaatttaaaaaaataataataacaataaacaattttaaaaaggacaaaaaaattaatgattgagaaaagaggcatttttttctgacatttggtcctgcttgaaacaacaaaagaagaagaaaaacccaccatcaccaccgattcctttgcttcttttttccttttttcctaccttgtttgaaaaccgtgggcttgggactgtgaattattgcatgacattcaa

SEQ ID NO: 33 - DNA, 8667 bp, Homo sapiens
cgcaccctccttccgcccctccttctccggggtcagccaggaagatgtcccgagctgctatccccggctcggcccgggcagccgccttctgagcccccgacccgaggcgccgagccgccgccgcccgatgggctgggccgtggagcgtctccgcagtcgtagctccagccgccgcgctcccagccccggcagcctcagcatcagcggcggcggcggcggcggcggcgtcttccgcatcgttcgccgcagcgtaacccggagccctttgctctttgcagaatggcccgcttcggagacgagatgccggcccgctacgggggaggaggctccggggcagccgccggggtggtcgtgggcagcggaggcgggcgaggagccgggggcagccggcagggcgggcagcccggggcgcaaaggatgtacaagcagtcaatggcgcagagagcgcggaccatggcactctacaaccccatccccgtccgacagaactgcctcacggttaaccggtctctcttcctcttcagcgaagacaacgtggtgagaaaatacgccaaaaagatcaccgaatggcctccctttgaatatatgattttagccaccatcatagcgaattgcatcgtcctcgcactggagcagcatctgcctgatgatgacaagaccccgatgtctgaacggctggatgacacagaaccatacttcattggaattttttgtttcgaggctggaattaaaatcattgcccttgggtttgccttccacaaaggctcctacttgaggaatggctggaatgtcatggactttgtggtggtgctaacgggcatcttggcgacagttgggacggagtttgacctacggacgctgagggcagttcgagtgctgcggccgctcaagctggtgtctggaatcccaagtttacaagtcgtcctgaagtcgatcatgaaggcgatgatccctttgctgcagatcggcctcctcctattttttgcaatccttatttttgcaatcatagggttagaattttatatgggaaaatttcataccacctgctttgaagaggggacagatgacattcagggtgagtctccggctccatgtgggacagaagagcccgcccgcacctgccccaatgggaccaaatgtcagccctactgggaagggcccaacaacgggatcactcagttcgacaacatcctgtttgcagtgctgactgttttccagtgcataaccatggaagggtggactgatctcctctacaatagcaacgatgcctcagggaacacttggaactggttgtacttcatccccctcatcatcatcggctccttttttatgctgaaccttgtgctgggtgtgctgtcaggggagtttgccaaagaaagggaacgggtggagaaccggcgggcttttctgaagctgaggcggcaacaacagattgaacgtgagctcaatgggtacatggaatggatctcaaaagcagaagaggtgatcctcgccgaggatgaaactgacggggagcagaggcatccctttgatggagctctgcggagaaccaccataaagaaaagcaagacagatttgctcaaccccgaagaggctgaggatcagctggctgatatagcctctgtgggttctcccttcgcccgagccagcattaaaagtgccaagctggagaactcgaccttttttcacaaaaaggagaggaggatgcgtttctacatccgccgcatggtcaaaactcaggccttctactggactgtactcagtttggtagctctcaacacgctgtgtgttgctattgttcactacaaccagcccgagtggctctccgacttcctttactatgcagaattcattttcttaggactctttatgtccgaaatgtttataaaaatgtacgggcttgggacgcggccttacttccactcttccttcaactgctttgactgtggggttatcattgggagcatcttcgaggtcatctgggctgtcataaaacctggcacatcctttggaatcagcgtgttacgagccctcaggttattgcgtattttcaaagtcacaaagtactgggcatctctcagaaacctggtcgtctctctcctcaactccatgaagtccatcatcagcctgttgtttctccttttcctgttcattgtcgtcttcgcccttttgggaatgcaactcttcggcggccagtttaatttcgatgaagggactcctcccaccaacttcgatacttttccagcagcaataatgacggtgtttcagatcctgacgggcgaagactggaacgaggtcatgtacgacgggatcaagtctcaggggggcgtgcagggcggcatggtgttctccatctatttcattgtactgacgctctttgggaactacaccctcctgaatgtgttcttggccatcgctgtggacaatctggccaacgcccaggagctcaccaaggacgagcaagaggaagaagaagcagcgaaccagaaacttgccctacagaaagccaaggaggtggcagaagtgagtcctctgtccgcggccaacatgtctatagctgtgaaagagcaacagaagaatcaaaagccagccaagtccgtgtgggagcagcggaccagtgagatgcgaaagcagaacttgctggccagccgggaggccctgtataacgaaatggacccggacgagcgctggaaggctgcctacacgcggcacctgcggccagacatgaagacgcacttggaccggccgctggtggtggacccgcaggagaaccgcaacaacaacaccaacaagagccgggcggccgagcccaccgtggaccagcgcctcggccagcagcgcgccgaggacttcctcaggaaacaggcccgctaccacgatcgggcccgggaccccagcggctcggcgggcctggacgcacggaggccctgggcgggaagccaggaggccgagctgagccgggagggaccctacggccgcgagtcggaccaccacgcccgggagggcagcctggagcaacccgggttctgggagggcgaggccgagcgaggcaaggccggggacccccaccggaggcacgtgcaccggcaggggggcagcagggagagccgcagcgggtccccgcgcacgggcgcggacggggagcatcgacgtcatcgcgcgcaccgcaggcccggggaggagggtccggaggacaaggcggagcggagggcgcggcaccgcgagggcagccggccggcccggggcggcgagggcgagggcgagggccccgacgggggcgagcgcaggagaaggcaccggcatggcgctccagccacgtacgagggggacgcgcggagggaggacaaggagcggaggcatcggaggaggaaagagaaccagggctccggggtccctgtgtcgggccccaacctgtcaaccacccggccaatccagcaggacctgggccgccaagacccacccctggcagaggatattgacaacatgaagaacaacaagctggccaccgcggagtcggccgctccccacggcagccttggccacgccggcctgccccagagcccagccaagatgggaaacagcaccgaccccggccccatgctggccatccctgccatggccaccaacccccagaacgccgccagccgccggacgcccaacaacccggggaacccatccaatcccggcccccccaagacccccgagaatagccttatcgtcaccaaccccagcggcacccagaccaattcagctaagactgccaggaaacccgaccacaccacagtggacatccccccagcctgcccaccccccctcaaccacaccgtcgtacaagtgaacaaaaacgccaacccagacccactgccaaaaaaagaggaagagaagaaggaggaggaggaagacgaccgtggggaagacggccctaagccaatgcctccctatagctccatgttcatcctgtccacgaccaacccccttcgccgcctgtgccattacatcctgaacctgcgctactttgagatgtgcatcctcatggtcattgccatgagcagcatcgccctggccgccgaggaccctgtgcagcccaacgcacctcggaacaacgtgctgcgatactttgactacgtttttacaggcgtctttacctttgagatggtgatcaagatgattgacctggggctcgtcctgcatcagggtgcctacttccgtgacctctggaatattctcgacttcatagtggtcagtggggccctggtagcctttgccttcactggcaatagcaaaggaaaagacatcaacacgattaaatccctccgagtcctccgggtgctacgacctcttaaaaccatcaagcggctgccaaagctcaaggctgtgtttgactgtgtggtgaactcacttaaaaacgtcttcaacatcctcatcgtctacatgctattcatgttcatcttcgccgtggtggctgtgcagctcttcaaggggaaattcttccactgcactgacgagtccaaagagtttgagaaagattgtcgaggcaaatacctcctctacgagaagaatgaggtgaaggcgcgagaccgggagtggaagaagtatgaattccattacgacaatgtgctgtgggctctgctgaccctcttcaccgtgtccacgggagaaggctggccacaggtcctcaagcattcggtggacgccacctttgagaaccagggccccagccccgggtaccgcatggagatgtccattttctacgtcgtctactttgtggtgttccccttcttctttgtcaatatctttgtggccttgatcatcatcaccttccaggagcaaggggacaagatgatggaggaatacagcctggagaaaaatgagagggcctgcattgatttcgccatcagcgccaagccgctgacccgacacatgccgcagaacaagcagagcttccagtaccgcatgtggcagttcgtggtgtctccgcctttcgagtacacgatcatggccatgatcgccctcaacaccatcgtgcttatgatgaagttctatggggcttctgttgcttatgaaaatgccctgcgggtgttcaacatcgtcttcacctccctcttctctctggaatgtgtgctgaaagtcatggcttttgggattctgaattatttccgcgatgcctggaacatcttcgactttgtgactgttctgggcagcatcaccgatatcctcgtgactgagtttgggaataacttcatcaacctgagctttctccgcctcttccgagctgcccggctcatcaaacttctccgtcagggttacaccatccgcattcttctctggacctttgtgcagtccttcaaggccctgccttatgtctgtctgctgatcgccatgctcttcttcatctatgccatcattgggatgcaggtgtttggtaacattggcatcgacgtggaggacgaggacagtgatgaagatgagttccaaatcactgagcacaataacttccggaccttcttccaggccctcatgcttctcttccggagtgccaccggggaagcttggcacaacatcatgctttcctgcctcagcgggaaaccgtgtgataagaactctggcatcctgactcgagagtgtggcaatgaatttgcttatttttactttgtttccttcatcttcctctgctcgtttctgatgctgaatctctttgtcgccgtcatcatggacaactttgagtacctcacccgagactcctccatcctgggcccccaccacctggatgagtacgtgcgtgtctgggccgagtatgaccccgcagcttgcggtcggattcattataaggatatgtacagtttattacgagtaatatctccccctctcggcttaggcaagaaatgtcctcatagggttgcttgcaagcggcttctgcggatggacctgcccgtcgcagatgacaacaccgtccacttcaattccaccctcatggctctgatccgcacagccctggacatcaagattgccaagggaggagccgacaaacagcagatggacgctgagctgcggaaggagatgatggcgatttggcccaatctgtcccagaagacgctagacctgctggtcacacctcacaagtccacggacctcaccgtggggaagatctacgcagccatgatgatcatggagtactaccggcagagcaaggccaagaagctgcaggccatgcgcgaggagcaggaccggacacccctcatgttccagcgcatggagcccccgtccccaacgcaggaagggggacctggccagaacgccctcccctccacccagctggacccaggaggagccctgatggctcacgaaagcggcctcaaggagagcccgtcctgggtgacccagcgtgcccaggagatgttccagaagacgggcacatggagtccggaacaaggcccccctaccgacatgcccaacagccagcctaactctcagtccgtggagatgcgagagatgggcagagatggctactccgacagcgagcactacctccccatggaaggccagggccgggctgcctccatgccccgcctccctgcagagaaccagaggagaaggggccggccacgtgggaataacctcagtaccatctcagacaccagccccatgaagcgttcagcctccgtgctgggccccaaggcccgacgcctggacgattactcgctggagcgggtcccgcccgaggagaaccagcggcaccaccagcggcgccgcgaccgcagccaccgcgcctctgagcgctccctgggccgctacaccgatgtggacacaggcttggggacagacctgagcatgaccacccaatccggggacctgccgtcgaaggagcgggaccaggagcggggccggcccaaggatcggaagcatcgacagcaccaccaccaccaccaccaccaccaccatcccccgccccccgacaaggaccgctatgcccaggaacggccggaccacggccgggcacgggctcgggaccagcgctggtcccgctcgcccagcgagggccgagagcacatggcgcaccggcagggcagtagttccgtaagtggaagcccagccccctcaacatctggtaccagcactccgcggcggggccgccgccagctcccccagaccccctccaccccccggccacacgtgtcctattcccctgtgatccgtaaggccggcggctcggggccccggcagcagcagcagcagcagcagcagcagcagcacagcagcagcagcagcagcagcagcagcagcagcaggcggtggccaggccgggccgggcggccaccagcggccctcggaggtacccaggccccacggccgagcctctggccggagatcggccgcccacggggggccacagcagcggccgctcgcccaggatggagaggcgggtcccaggcccggcccggagcgagtcccccagggcctgtcgacacggcggggcccggtggccggcatctggcccgcacgtgtccgaggggcccccgggtccccggcaccatggctactaccggggctccgactacgacgaggccgatggcccgggcagcgggggcggcgaggaggccatggccggggcctacgacgcgccaccccccgtacgacacgcgtcctcgggcgccaccgggcgctcgcccaggactccccgggcctcgggcccggcctgcgcctcgccttctcggcacggccggcgactccccaacggctactacccggcgcacggactggccaggccccgcgggccgggctccaggaagggcctgcacgaaccctacagcgagagtgacgatgattggtgctaagcccgggcgaggtggcgcccgcccggccccccacgcaccccacgcacacaccccacccgaggagccgcgcagaggccgcgggggcccagcacagagggcccgggagagggccagccgggagaccccagactctggagaggccagggctgggccacaagggtgtcccgcagagaccctcggccaaaagagaccctcctgggcagccacggcgccccccaaccagccccgatccccccacccacgacaggggctctcgggtgggaggcagggagcagacaaaccacacagccaagggatttgaattaactcagccatttttggagaactttggggaacatgaaaaaaaaaaaaaaaaaaaaaaaaaaacatttttaaaagaaaaaacggggagaaaaaaatagcttctattgatgagttttatcatctcaattgaatctttcctttccctgatgaagacagctggtggccgagtgcggcaaagaagccagaaggaaccagaatcccagtgccctacacccaccaccagacacactcacacccacacacgttctcagacacacacaagagtgcttgccggttataccaaaccctactattactgcctgcagaaatcaatttaaaaaaataataataacaataaacaattttaaaaaggacaaaaaaattaatgattgagaaaagaggcatttttttctgacatttggtcctgcttgaaacaacaaaagaagaagaaaaacccaccatcaccaccgattcctttgcttcttttttccttttttcctaccttgtttgaaaaccgtgggcttgggactgtgaattattgcatgacattcaa

SEQ ID NO: 34 - DNA, 8664 bp, Homo sapiens
gatcagccaagcaggctgctgagaaagatgacctgaattgcagggatgcagaaagtgctgaagatgctttgtcagctgagaactggttaagagaaagtggctgatacagcaaccccgttcagtgtctgcttttgtggggagccctctgctcagaaaactgctcttcttggcacccacttttctccctcctgtctctgggccacccttcttctttccactgggtgggccatggatgcatggacttcagatagctcggacccctgggtgctgacgagatgggaccctcgggacccctggaggactcgcagtgctgaccactagccgcgtcgcctgagccccagcgctgatgcgatacagtttccccctcactgtgctggagggagaagaccctgggatttctgagcgaggcccgtggatgttgaagtcttcctgggtccccgactccatgctctcgcgccccagttactatgacgccctgcacaaccgcagctcggggcacgcccagcgccctgcaggacactcggcctccccggctcagcatctgcttcgagggcccccctctgaggcggcggggcggcgtggtggatcaccgagatgtcatcttggcccaccaggcccacaaaatccacagcaccccccaggccaggaggaaagaatgggaccaccatcatagcgaattgcatcgtcctcgcactggagcagcatctgcctgatgatgacaagaccccgatgtctgaacggctggatgacacagaaccatacttcattggaattttttgtttcgaggctggaattaaaatcattgcccttgggtttgccttccacaaaggctcctacttgaggaatggctggaatgtcatggactttgtggtggtgctaacgggcatcttggcgacagttgggacggagtttgacctacggacgctgagggcagttcgagtgctgcggccgctcaagctggtgtctggaatcccaagtttacaagtcgtcctgaagtcgatcatgaaggcgatgatccctttgctgcagatcggcctcctcctattttttgcaatccttatttttgcaatcatagggttagaattttatatgggaaaatttcataccacctgctttgaagaggggacagatgacattcagggtgagtctccggctccatgtgggacagaagagcccgcccgcacctgccccaatgggaccaaatgtcagccctactgggaagggcccaacaacgggatcactcagttcgacaacatcctgtttgcagtgctgactgttttccagtgcataaccatggaagggtggactgatctcctctacaatagcaacgatgcctcagggaacacttggaactggttgtacttcatccccctcatcatcatcggctccttttttatgctgaaccttgtgctgggtgtgctgtcaggggagtttgccaaagaaagggaacgggtggagaaccggcgggcttttctgaagctgaggcggcaacaacagattgaacgtgagctcaatgggtacatggaatggatctcaaaagcagaagaggtgatcctcgccgaggatgaaactgacggggagcagaggcatccctttgatggagctctgcggagaaccaccataaagaaaagcaagacagatttgctcaaccccgaagaggctgaggatcagctggctgatatagcctctgtgggttctcccttcgcccgagccagcattaaaagtgccaagctggagaactcgaccttttttcacaaaaaggagaggaggatgcgtttctacatccgccgcatggtcaaaactcaggccttctactggactgtactcagtttggtagctctcaacacgctgtgtgttgctattgttcactacaaccagcccgagtggctctccgacttcctttactatgcagaattcattttcttaggactctttatgtccgaaatgtttataaaaatgtacgggcttgggacgcggccttacttccactcttccttcaactgctttgactgtggggttatcattgggagcatcttcgaggtcatctgggctgtcataaaacctggcacatcctttggaatcagcgtgttacgagccctcaggttattgcgtattttcaaagtcacaaagtactgggcatctctcagaaacctggtcgtctctctcctcaactccatgaagtccatcatcagcctgttgtttctccttttcctgttcattgtcgtcttcgcccttttgggaatgcaactcttcggcggccagtttaatttcgatgaagggactcctcccaccaacttcgatacttttccagcagcaataatgacggtgtttcagatcctgacgggcgaagactggaacgaggtcatgtacgacgggatcaagtctcaggggggcgtgcagggcggcatggtgttctccatctatttcattgtactgacgctctttgggaactacaccctcctgaatgtgttcttggccatcgctgtggacaatctggccaacgcccaggagctcaccaaggacgagcaagaggaagaagaagcagcgaaccagaaacttgccctacagaaagccaaggaggtggcagaagtgagtcctctgtccgcggccaacatgtctatagctgtgaaagagcaacagaagaatcaaaagccagccaagtccgtgtgggagcagcggaccagtgagatgcgaaagcagaacttgctggccagccgggaggccctgtataacgaaatggacccggacgagcgctggaaggctgcctacacgcggcacctgcggccagacatgaagacgcacttggaccggccgctggtggtggacccgcaggagaaccgcaacaacaacaccaacaagagccgggcggccgagcccaccgtggaccagcgcctcggccagcagcgcgccgaggacttcctcaggaaacaggcccgctaccacgatcgggcccgggaccccagcggctcggcgggcctggacgcacggaggccctgggcgggaagccaggaggccgagctgagccgggagggaccctacggccgcgagtcggaccaccacgcccgggagggcagcctggagcaacccgggttctgggagggcgaggccgagcgaggcaaggccggggacccccaccggaggcacgtgcaccggcaggggggcagcagggagagccgcagcgggtccccgcgcacgggcgcggacggggagcatcgacgtcatcgcgcgcaccgcaggcccggggaggagggtccggaggacaaggcggagcggagggcgcggcaccgcgagggcagccggccggcccggggcggcgagggcgagggcgagggccccgacgggggcgagcgcaggagaaggcaccggcatggcgctccagccacgtacgagggggacgcgcggagggaggacaaggagcggaggcatcggaggaggaaagagaaccagggctccggggtccctgtgtcgggccccaacctgtcaaccacccggccaatccagcaggacctgggccgccaagacccacccctggcagaggatattgacaacatgaagaacaacaagctggccaccgcggagtcggccgctccccacggcagccttggccacgccggcctgccccagagcccagccaagatgggaaacagcaccgaccccggccccatgctggccatccctgccatggccaccaacccccagaacgccgccagccgccggacgcccaacaacccggggaacccatccaatcccggcccccccaagacccccgagaatagccttatcgtcaccaaccccagcggcacccagaccaattcagctaagactgccaggaaacccgaccacaccacagtggacatccccccagcctgcccaccccccctcaaccacaccgtcgtacaagtgaacaaaaacgccaacccagacccactgccaaaaaaagaggaagagaagaaggaggaggaggaagacgaccgtggggaagacggccctaagccaatgcctccctatagctccatgttcatcctgtccacgaccaacccccttcgccgcctgtgccattacatcctgaacctgcgctactttgagatgtgcatcctcatggtcattgccatgagcagcatcgccctggccgccgaggaccctgtgcagcccaacgcacctcggaacaacgtgctgcgatactttgactacgtttttacaggcgtctttacctttgagatggtgatcaagatgattgacctggggctcgtcctgcatcagggtgcctacttccgtgacctctggaatattctcgacttcatagtggtcagtggggccctggtagcctttgccttcactggcaatagcaaaggaaaagacatcaacacgattaaatccctccgagtcctccgggtgctacgacctcttaaaaccatcaagcggctgccaaagctcaaggctgtgtttgactgtgtggtgaactcacttaaaaacgtcttcaacatcctcatcgtctacatgctattcatgttcatcttcgccgtggtggctgtgcagctcttcaaggggaaattcttccactgcactgacgagtccaaagagtttgagaaagattgtcgaggcaaatacctcctctacgagaagaatgaggtgaaggcgcgagaccgggagtggaagaagtatgaattccattacgacaatgtgctgtgggctctgctgaccctcttcaccgtgtccacgggagaaggctggccacaggtcctcaagcattcggtggacgccacctttgagaaccagggccccagccccgggtaccgcatggagatgtccattttctacgtcgtctactttgtggtgttccccttcttctttgtcaatatctttgtggccttgatcatcatcaccttccaggagcaaggggacaagatgatggaggaatacagcctggagaaaaatgagagggcctgcattgatttcgccatcagcgccaagccgctgacccgacacatgccgcagaacaagcagagcttccagtaccgcatgtggcagttcgtggtgtctccgcctttcgagtacacgatcatggccatgatcgccctcaacaccatcgtgcttatgatgaagttctatggggcttctgttgcttatgaaaatgccctgcgggtgttcaacatcgtcttcacctccctcttctctctggaatgtgtgctgaaagtcatggcttttgggattctgaattatttccgcgatgcctggaacatcttcgactttgtgactgttctgggcagcatcaccgatatcctcgtgactgagtttgggaataacttcatcaacctgagctttctccgcctcttccgagctgcccggctcatcaaacttctccgtcagggttacaccatccgcattcttctctggacctttgtgcagtccttcaaggccctgccttatgtctgtctgctgatcgccatgctcttcttcatctatgccatcattgggatgcaggtgtttggtaacattggcatcgacgtggaggacgaggacagtgatgaagatgagttccaaatcactgagcacaataacttccggaccttcttccaggccctcatgcttctcttccggagtgccaccggggaagcttggcacaacatcatgctttcctgcctcagcgggaaaccgtgtgataagaactctggcatcctgactcgagagtgtggcaatgaatttgcttatttttactttgtttccttcatcttcctctgctcgtttctgatgctgaatctctttgtcgccgtcatcatggacaactttgagtacctcacccgagactcctccatcctgggcccccaccacctggatgagtacgtgcgtgtctgggccgagtatgaccccgcagcttgcggtcggattcattataaggatatgtacagtttattacgagtaatatctccccctctcggcttaggcaagaaatgtcctcatagggttgcttgcaagcggcttctgcggatggacctgcccgtcgcagatgacaacaccgtccacttcaattccaccctcatggctctgatccgcacagccctggacatcaagattgccaagggaggagccgacaaacagcagatggacgctgagctgcggaaggagatgatggcgatttggcccaatctgtcccagaagacgctagacctgctggtcacacctcacaagtccacggacctcaccgtggggaagatctacgcagccatgatgatcatggagtactaccggcagagcaaggccaagaagctgcaggccatgcgcgaggagcaggaccggacacccctcatgttccagcgcatggagcccccgtccccaacgcaggaagggggacctggccagaacgccctcccctccacccagctggacccaggaggagccctgatggctcacgaaagcggcctcaaggagagcccgtcctgggtgacccagcgtgcccaggagatgttccagaagacgggcacatggagtccggaacaaggcccccctaccgacatgcccaacagccagcctaactctcagtccgtggagatgcgagagatgggcagagatggctactccgacagcgagcactacctccccatggaaggccagggccgggctgcctccatgccccgcctccctgcagagaaccagaccatctcagacaccagccccatgaagcgttcagcctccgtgctgggccccaaggcccgacgcctggacgattactcgctggagcgggtcccgcccgaggagaaccagcggcaccaccagcggcgccgcgaccgcagccaccgcgcctctgagcgctccctgggccgctacaccgatgtggacacaggcttggggacagacctgagcatgaccacccaatccggggacctgccgtcgaaggagcgggaccaggagcggggccggcccaaggatcggaagcatcgacagcaccaccaccaccaccaccaccaccaccatcccccgccccccgacaaggaccgctatgcccaggaacggccggaccacggccgggcacgggctcgggaccagcgctggtcccgctcgcccagcgagggccgagagcacatggcgcaccggcagggcagtagttccgtaagtggaagcccagccccctcaacatctggtaccagcactccgcggcggggccgccgccagctcccccagaccccctccaccccccggccacacgtgtcctattcccctgtgatccgtaaggccggcggctcggggccccgcagcagcagcagcagcagcagcagcagcagcagcaggcggtggccaggccgggccgggcggccaccagcggccctcggaggtacccaggccccacggccgagcctctggccggagatcggccgcccacggggggccacagcagcggccgctcgcccaggatggagaggcgggtcccaggcccggcccggagcgagtcccccagggcctgtcgacacggcggggcccggtggccggcatctggcccgcacgtgtccgaggggcccccgggtccccggcaccatggctactaccggggctccgactacgacgaggccgatggcccgggcagcgggggcggcgaggaggccatggccggggcctacgacgcgccaccccccgtacgacacgcgtcctcgggcgccaccgggcgctcgcccaggactccccgggcctcgggcccggcctgcgcctcgccttctcggcacggccggcgactccccaacggctactacccggcgcacggactggccaggccccgcgggccgggctccaggaagggcctgcacgaaccctacagcgagagtgacgatgattggtgctaagcccgggcgaggtggcgcccgcccggccccccacgcaccccacgcacacaccccacccgaggagccgcgcagaggccgcgggggcccagcacagagggcccgggagagggccagccgggagaccccagactctggagaggccagggctgggccacaagggtgtcccgcagagaccctcggccaaaagagaccctcctgggcagccacggcgccccccaaccagccccgatccccccacccacgacaggggctctcgggtgggaggcagggagcagacaaaccacacagccaagggatttgaattaactcagccatttttggagaactttggggaacatgaaaaaaaaaaaaaaaaaaaaaaaaaaacatttttaaaagaaaaaacggggagaaaaaaatagcttctattgatgagttttatcatctcaattgaatctttcctttccctgatgaagacagctggtggccgagtgcggcaaagaagccagaaggaaccagaatcccagtgccctacacccaccaccagacacactcacacccacacacgttctcagacacacacaagagtgcttgccggttataccaaaccctactattactgcctgcagaaatcaatttaaaaaaataataataacaataaacaattttaaaaaggacaaaaaaattaatgattgagaaaagaggcatttttttctgacatttggtcctgcttgaaacaacaaaagaagaagaaaaacccaccatcaccaccgattcctttgcttcttttttccttttttcctaccttgtttgaaaaccgtgggcttgggactgtgaattattgcatgacattcaa

SEQ ID NO: 35 - DNA, 8664 bp, Homo sapiens
gatcagccaagcaggctgctgagaaagatgacctgaattgcagggatgcagaaagtgctgaagatgctttgtcagctgagaactggttaagagaaagtggctgatacagcaaccccgttcagtgtctgcttttgtggggagccctctgctcagaaaactgctcttcttggcacccacttttctccctcctgtctctgggccacccttcttctttccactgggtgggccatggatgcatggacttcagatagctcggacccctgggtgctgacgagatgggaccctcgggacccctggaggactcgcagtgctgaccactagccgcgtcgcctgagccccagcgctgatgcgatacagtttccccctcactgtgctggagggagaagaccctgggatttctgagcgaggcccgtggatgttgaagtcttcctgggtccccgactccatgctctcgcgccccagttactatgacgccctgcacaaccgcagctcggggcacgcccagcgccctgcaggacactcggcctccccggctcagcatctgcttcgagggcccccctctgaggcggcggggcggcgtggtggatcaccgagatgtcatcttggcccaccaggcccacaaaatccacagcaccccccaggccaggaggaaagaatgggaccaccatcatagcgaattgcatcgtcctcgcactggagcagcatctgcctgatgatgacaagaccccgatgtctgaacggctggatgacacagaaccatacttcattggaattttttgtttcgaggctggaattaaaatcattgcccttgggtttgccttccacaaaggctcctacttgaggaatggctggaatgtcatggactttgtggtggtgctaacgggcatcttggcgacagttgggacggagtttgacctacggacgctgagggcagttcgagtgctgcggccgctcaagctggtgtctggaatcccaagtttacaagtcgtcctgaagtcgatcatgaaggcgatgatccctttgctgcagatcggcctcctcctattttttgcaatccttatttttgcaatcatagggttagaattttatatgggaaaatttcataccacctgctttgaagaggggacagatgacattcagggtgagtctccggctccatgtgggacagaagagcccgcccgcacctgccccaatgggaccaaatgtcagccctactgggaagggcccaacaacgggatcactcagttcgacaacatcctgtttgcagtgctgactgttttccagtgcataaccatggaagggtggactgatctcctctacaatagcaacgatgcctcagggaacacttggaactggttgtacttcatccccctcatcatcatcggctccttttttatgctgaaccttgtgctgggtgtgctgtcaggggagtttgccaaagaaagggaacgggtggagaaccggcgggcttttctgaagctgaggcggcaacaacagattgaacgtgagctcaatgggtacatggaatggatctcaaaagcagaagaggtgatcctcgccgaggatgaaactgacggggagcagaggcatccctttgatggagctctgcggagaaccaccataaagaaaagcaagacagatttgctcaaccccgaagaggctgaggatcagctggctgatatagcctctgtgggttctcccttcgcccgagccagcattaaaagtgccaagctggagaactcgaccttttttcacaaaaaggagaggaggatgcgtttctacatccgccgcatggtcaaaactcaggccttctactggactgtactcagtttggtagctctcaacacgctgtgtgttgctattgttcactacaaccagcccgagtggctctccgacttcctttactatgcagaattcattttcttaggactctttatgtccgaaatgtttataaaaatgtacgggcttgggacgcggccttacttccactcttccttcaactgctttgactgtggggttatcattgggagcatcttcgaggtcatctgggctgtcataaaacctggcacatcctttggaatcagcgtgttacgagccctcaggttattgcgtattttcaaagtcacaaagtactgggcatctctcagaaacctggtcgtctctctcctcaactccatgaagtccatcatcagcctgttgtttctccttttcctgttcattgtcgtcttcgcccttttgggaatgcaactcttcggcggccagtttaatttcgatgaagggactcctcccaccaacttcgatacttttccagcagcaataatgacggtgtttcagatcctgacgggcgaagactggaacgaggtcatgtacgacgggatcaagtctcaggggggcgtgcagggcggcatggtgttctccatctatttcattgtactgacgctctttgggaactacaccctcctgaatgtgttcttggccatcgctgtggacaatctggccaacgcccaggagctcaccaaggacgagcaagaggaagaagaagcagcgaaccagaaacttgccctacagaaagccaaggaggtggcagaagtgagtcctctgtccgcggccaacatgtctatagctgtgaaagagcaacagaagaatcaaaagccagccaagtccgtgtgggagcagcggaccagtgagatgcgaaagcagaacttgctggccagccgggaggccctgtataacgaaatggacccggacgagcgctggaaggctgcctacacgcggcacctgcggccagacatgaagacgcacttggaccggccgctggtggtggacccgcaggagaaccgcaacaacaacaccaacaagagccgggcggccgagcccaccgtggaccagcgcctcggccagcagcgcgccgaggacttcctcaggaaacaggcccgctaccacgatcgggcccgggaccccagcggctcggcgggcctggacgcacggaggccctgggcgggaagccaggaggccgagctgagccgggagggaccctacggccgcgagtcggaccaccacgcccgggagggcagcctggagcaacccgggttctgggagggcgaggccgagcgaggcaaggccggggacccccaccggaggcacgtgcaccggcaggggggcagcagggagagccgcagcgggtccccgcgcacgggcgcggacggggagcatcgacgtcatcgcgcgcaccgcaggcccggggaggagggtccggaggacaaggcggagcggagggcgcggcaccgcgagggcagccggccggcccggggcggcgagggcgagggcgagggccccgacgggggcgagcgcaggagaaggcaccggcatggcgctccagccacgtacgagggggacgcgcggagggaggacaaggagcggaggcatcggaggaggaaagagaaccagggctccggggtccctgtgtcgggccccaacctgtcaaccacccggccaatccagcaggacctgggccgccaagacccacccctggcagaggatattgacaacatgaagaacaacaagctggccaccgcggagtcggccgctccccacggcagccttggccacgccggcctgccccagagcccagccaagatgggaaacagcaccgaccccggccccatgctggccatccctgccatggccaccaacccccagaacgccgccagccgccggacgcccaacaacccggggaacccatccaatcccggcccccccaagacccccgagaatagccttatcgtcaccaaccccagcggcacccagaccaattcagctaagactgccaggaaacccgaccacaccacagtggacatccccccagcctgcccaccccccctcaaccacaccgtcgtacaagtgaacaaaaacgccaacccagacccactgccaaaaaaagaggaagagaagaaggaggaggaggaagacgaccgtggggaagacggccctaagccaatgcctccctatagctccatgttcatcctgtccacgaccaacccccttcgccgcctgtgccattacatcctgaacctgcgctactttgagatgtgcatcctcatggtcattgccatgagcagcatcgccctggccgccgaggaccctgtgcagcccaacgcacctcggaacaacgtgctgcgatactttgactacgtttttacaggcgtctttacctttgagatggtgatcaagatgattgacctggggctcgtcctgcatcagggtgcctacttccgtgacctctggaatattctcgacttcatagtggtcagtggggccctggtagcctttgccttcactggcaatagcaaaggaaaagacatcaacacgattaaatccctccgagtcctccgggtgctacgacctcttaaaaccatcaagcggctgccaaagctcaaggctgtgtttgactgtgtggtgaactcacttaaaaacgtcttcaacatcctcatcgtctacatgctattcatgttcatcttcgccgtggtggctgtgcagctcttcaaggggaaattcttccactgcactgacgagtccaaagagtttgagaaagattgtcgaggcaaatacctcctctacgagaagaatgaggtgaaggcgcgagaccgggagtggaagaagtatgaattccattacgacaatgtgctgtgggctctgctgaccctcttcaccgtgtccacgggagaaggctggccacaggtcctcaagcattcggtggacgccacctttgagaaccagggccccagccccgggtaccgcatggagatgtccattttctacgtcgtctactttgtggtgttccccttcttctttgtcaatatctttgtggccttgatcatcatcaccttccaggagcaaggggacaagatgatggaggaatacagcctggagaaaaatgagagggcctgcattgatttcgccatcagcgccaagccgctgacccgacacatgccgcagaacaagcagagcttccagtaccgcatgtggcagttcgtggtgtctccgcctttcgagtacacgatcatggccatgatcgccctcaacaccatcgtgcttatgatgaagttctatggggcttctgttgcttatgaaaatgccctgcgggtgttcaacatcgtcttcacctccctcttctctctggaatgtgtgctgaaagtcatggcttttgggattctgaattatttccgcgatgcctggaacatcttcgactttgtgactgttctgggcagcatcaccgatatcctcgtgactgagtttgggaataacttcatcaacctgagctttctccgcctcttccgagctgcccggctcatcaaacttctccgtcagggttacaccatccgcattcttctctggacctttgtgcagtccttcaaggccctgccttatgtctgtctgctgatcgccatgctcttcttcatctatgccatcattgggatgcaggtgtttggtaacattggcatcgacgtggaggacgaggacagtgatgaagatgagttccaaatcactgagcacaataacttccggaccttcttccaggccctcatgcttctcttccggagtgccaccggggaagcttggcacaacatcatgctttcctgcctcagcgggaaaccgtgtgataagaactctggcatcctgactcgagagtgtggcaatgaatttgcttatttttactttgtttccttcatcttcctctgctcgtttctgatgctgaatctctttgtcgccgtcatcatggacaactttgagtacctcacccgagactcctccatcctgggcccccaccacctggatgagtacgtgcgtgtctgggccgagtatgaccccgcagcttggggccgcatgccttacctggacatgtatcagatgctgagacacatgtctccgcccctgggtctggggaagaagtgtccggccagagtggcttacaagcggcttctgcggatggacctgcccgtcgcagatgacaacaccgtccacttcaattccaccctcatggctctgatccgcacagccctggacatcaagattgccaagggaggagccgacaaacagcagatggacgctgagctgcggaaggagatgatggcgatttggcccaatctgtcccagaagacgctagacctgctggtcacacctcacaagtccacggacctcaccgtggggaagatctacgcagccatgatgatcatggagtactaccggcagagcaaggccaagaagctgcaggccatgcgcgaggagcaggaccggacacccctcatgttccagcgcatggagcccccgtccccaacgcaggaagggggacctggccagaacgccctcccctccacccagctggacccaggaggagccctgatggctcacgaaagcggcctcaaggagagcccgtcctgggtgacccagcgtgcccaggagatgttccagaagacgggcacatggagtccggaacaaggcccccctaccgacatgcccaacagccagcctaactctcagtccgtggagatgcgagagatgggcagagatggctactccgacagcgagcactacctccccatggaaggccagggccgggctgcctccatgccccgcctccctgcagagaaccagaccatctcagacaccagccccatgaagcgttcagcctccgtgctgggccccaaggcccgacgcctggacgattactcgctggagcgggtcccgcccgaggagaaccagcggcaccaccagcggcgccgcgaccgcagccaccgcgcctctgagcgctccctgggccgctacaccgatgtggacacaggcttggggacagacctgagcatgaccacccaatccggggacctgccgtcgaaggagcgggaccaggagcggggccggcccaaggatcggaagcatcgacagcaccaccaccaccaccaccaccaccaccatcccccgccccccgacaaggaccgctatgcccaggaacggccggaccacggccgggcacgggctcgggaccagcgctggtcccgctcgcccagcgagggccgagagcacatggcgcaccggcagggcagtagttccgtaagtggaagcccagccccctcaacatctggtaccagcactccgcggcggggccgccgccagctcccccagaccccctccaccccccggccacacgtgtcctattcccctgtgatccgtaaggccggcggctcggggccccgcagcagcagcagcagcagcagcagcagcagcagcaggcggtggccaggccgggccgggcggccaccagcggccctcggaggtacccaggccccacggccgagcctctggccggagatcggccgcccacggggggccacagcagcggccgctcgcccaggatggagaggcgggtcccaggcccggcccggagcgagtcccccagggcctgtcgacacggcggggcccggtggccggcatctggcccgcacgtgtccgaggggcccccgggtccccggcaccatggctactaccggggctccgactacgacgaggccgatggcccgggcagcgggggcggcgaggaggccatggccggggcctacgacgcgccaccccccgtacgacacgcgtcctcgggcgccaccgggcgctcgcccaggactccccgggcctcgggcccggcctgcgcctcgccttctcggcacggccggcgactccccaacggctactacccggcgcacggactggccaggccccgcgggccgggctccaggaagggcctgcacgaaccctacagcgagagtgacgatgattggtgctaagcccgggcgaggtggcgcccgcccggccccccacgcaccccacgcacacaccccacccgaggagccgcgcagaggccgcgggggcccagcacagagggcccgggagagggccagccgggagaccccagactctggagaggccagggctgggccacaagggtgtcccgcagagaccctcggccaaaagagaccctcctgggcagccacggcgccccccaaccagccccgatccccccacccacgacaggggctctcgggtgggaggcagggagcagacaaaccacacagccaagggatttgaattaactcagccatttttggagaactttggggaacatgaaaaaaaaaaaaaaaaaaaaaaaaaaacatttttaaaagaaaaaacggggagaaaaaaatagcttctattgatgagttttatcatctcaattgaatctttcctttccctgatgaagacagctggtggccgagtgcggcaaagaagccagaaggaaccagaatcccagtgccctacacccaccaccagacacactcacacccacacacgttctcagacacacacaagagtgcttgccggttataccaaaccctactattactgcctgcagaaatcaatttaaaaaaataataataacaataaacaattttaaaaaggacaaaaaaattaatgattgagaaaagaggcatttttttctgacatttggtcctgcttgaaacaacaaaagaagaagaaaaacccaccatcaccaccgattcctttgcttcttttttccttttttcctaccttgtttgaaaaccgtgggcttgggactgtgaattattgcatgacattcaa

SEQ ID NO: 36 - DNA, 6980 bp, Homo sapiens
gatcagccaagcaggctgctgagaaagatgacctgaattgcagggatgcagaaagtgctgaagatgctttgtcagctgagaactggttaagagaaagtggctgatacagcaaccccgttcagtgtctgcttttgtggggagccctctgctcagaaaactgctcttcttggcacccacttttctccctcctgtctctgggccacccttcttctttccactgggtgggccatggatgcatggacttcagatagctcggacccctgggtgctgacgagatgggaccctcgggacccctggaggactcgcagtgctgaccactagccgcgtcgcctgagccccagcgctgatgcgatacagtttccccctcactgtgctggagggagaagaccctgggatttctgagcgaggcccgtggatgttgaagtcttcctgggtccccgactccatgctctcgcgccccagttactatgacgccctgcacaaccgcagctcggggcacgcccagcgccctgcaggacactcggcctccccggctcagcatctgcttcgagggcccccctctgaggcggcggggcggcgtggtggatcaccgagatgtcatcttggcccaccaggcccacaaaatccacagcaccccccaggccaggaggaaagaatgggaccaccatcatagcgaattgcatcgtcctcgcactggagcagcatctgcctgatgatgacaagaccccgatgtctgaacggctggatgacacagaaccatacttcattggaattttttgtttcgaggctggaattaaaatcattgcccttgggtttgccttccacaaaggctcctacttgaggaatggctggaatgtcatggactttgtggtggtgctaacgggcatcttggcgacagttgggacggagtttgacctacggacgctgagggcagttcgagtgctgcggccgctcaagctggtgtctggaatcccaagtttacaagtcgtcctgaagtcgatcatgaaggcgatgatccctttgctgcagatcggcctcctcctattttttgcaatccttatttttgcaatcatagggttagaattttatatgggaaaatttcataccacctgctttgaagaggggacagatgacattcagggtgagtctccggctccatgtgggacagaagagcccgcccgcacctgccccaatgggaccaaatgtcagccctactgggaagggcccaacaacgggatcactcagttcgacaacatcctgtttgcagtgctgactgttttccagtgcataaccatggaagggtggactgatctcctctacaatagcaacgatgcctcagggaacacttggaactggttgtacttcatccccctcatcatcatcggctccttttttatgctgaaccttgtgctgggtgtgctgtcaggggagtttgccaaagaaagggaacgggtggagaaccggcgggcttttctgaagctgaggcggcaacaacagattgaacgtgagctcaatgggtacatggaatggatctcaaaagcagaagaggtgatcctcgccgaggatgaaactgacggggagcagaggcatccctttgatggagctctgcggagaaccaccataaagaaaagcaagacagatttgctcaaccccgaagaggctgaggatcagctggctgatatagcctctgtgggttctcccttcgcccgagccagcattaaaagtgccaagctggagaactcgaccttttttcacaaaaaggagaggaggatgcgtttctacatccgccgcatggtcaaaactcaggccttctactggactgtactcagtttggtagctctcaacacgctgtgtgttgctattgttcactacaaccagcccgagtggctctccgacttcctttactatgcagaattcattttcttaggactctttatgtccgaaatgtttataaaaatgtacgggcttgggacgcggccttacttccactcttccttcaactgctttgactgtggggttatcattgggagcatcttcgaggtcatctgggctgtcataaaacctggcacatcctttggaatcagcgtgttacgagccctcaggttattgcgtattttcaaagtcacaaagtactgggcatctctcagaaacctggtcgtctctctcctcaactccatgaagtccatcatcagcctgttgtttctccttttcctgttcattgtcgtcttcgcccttttgggaatgcaactcttcggcggccagtttaatttcgatgaagggactcctcccaccaacttcgatacttttccagcagcaataatgacggtgtttcagatcctgacgggcgaagactggaacgaggtcatgtacgacgggatcaagtctcaggggggcgtgcagggcggcatggtgttctccatctatttcattgtactgacgctctttgggaactacaccctcctgaatgtgttcttggccatcgctgtggacaatctggccaacgcccaggagctcaccaaggacgagcaagaggaagaagaagcagcgaaccagaaacttgccctacagaaagccaaggaggtggcagaagtgagtcctctgtccgcggccaacatgtctatagctgtgaaagagcaacagaagaatcaaaagccagccaagtccgtgtgggagcagcggaccagtgagatgcgaaagcagaacttgctggccagccgggaggccctgtataacgaaatggacccggacgagcgctggaaggctgcctacacgcggcacctgcggccagacatgaagacgcacttggaccggccgctggtggtggacccgcaggagaaccgcaacaacaacaccaacaagagccgggcggccgagcccaccgtggaccagcgcctcggccagcagcgcgccgaggacttcctcaggaaacaggcccgctaccacgatcgggcccgggaccccagcggctcggcgggcctggacgcacggaggccctgggcgggaagccaggaggccgagctgagccgggagggaccctacggccgcgagtcggaccaccacgcccgggagggcagcctggagcaacccgggttctgggagggcgaggccgagcgaggcaaggccggggacccccaccggaggcacgtgcaccggcaggggggcagcagggagagccgcagcgggtccccgcgcacgggcgcggacggggagcatcgacgtcatcgcgcgcaccgcaggcccggggaggagggtccggaggacaaggcggagcggagggcgcggcaccgcgagggcagccggccggcccggggcggcgagggcgagggcgagggccccgacgggggcgagcgcaggagaaggcaccggcatggcgctccagccacgtacgagggggacgcgcggagggaggacaaggagcggaggcatcggaggaggaaagagaaccagggctccggggtccctgtgtcgggccccaacctgtcaaccacccggccaatccagcaggacctgggccgccaagacccacccctggcagaggatattgacaacatgaagaacaacaagctggccaccgcggagtcggccgctccccacggcagccttggccacgccggcctgccccagagcccagccaagatgggaaacagcaccgaccccggccccatgctggccatccctgccatggccaccaacccccagaacgccgccagccgccggacgcccaacaacccggggaacccatccaatcccggcccccccaagacccccgagaatagccttatcgtcaccaaccccagcggcacccagaccaattcagctaagactgccaggaaacccgaccacaccacagtggacatccccccagcctgcccaccccccctcaaccacaccgtcgtacaagtgaacaaaaacgccaacccagacccactgccaaaaaaagaggaagagaagaaggaggaggaggaagacgaccgtggggaagacggccctaagccaatgcctccctatagctccatgttcatcctgtccacgaccaacccccttcgccgcctgtgccattacatcctgaacctgcgctactttgagatgtgcatcctcatggtcattgccatgagcagcatcgccctggccgccgaggaccctgtgcagcccaacgcacctcggaacaacgtgctgcgatactttgactacgtttttacaggcgtctttacctttgagatggtgatcaagatgattgacctggggctcgtcctgcatcagggtgcctacttccgtgacctctggaatattctcgacttcatagtggtcagtggggccctggtagcctttgccttcactggcaatagcaaaggaaaagacatcaacacgattaaatccctccgagtcctccgggtgctacgacctcttaaaaccatcaagcggctgccaaagctcaaggctgtgtttgactgtgtggtgaactcacttaaaaacgtcttcaacatcctcatcgtctacatgctattcatgttcatcttcgccgtggtggctgtgcagctcttcaaggggaaattcttccactgcactgacgagtccaaagagtttgagaaagattgtcgaggcaaatacctcctctacgagaagaatgaggtgaaggcgcgagaccgggagtggaagaagtatgaattccattacgacaatgtgctgtgggctctgctgaccctcttcaccgtgtccacgggagaaggctggccacaggtcctcaagcattcggtggacgccacctttgagaaccagggccccagccccgggtaccgcatggagatgtccattttctacgtcgtctactttgtggtgttccccttcttctttgtcaatatctttgtggccttgatcatcatcaccttccaggagcaaggggacaagatgatggaggaatacagcctggagaaaaatgagagggcctgcattgatttcgccatcagcgccaagccgctgacccgacacatgccgcagaacaagcagagcttccagtaccgcatgtggcagttcgtggtgtctccgcctttcgagtacacgatcatggccatgatcgccctcaacaccatcgtgcttatgatgaagttctatggggcttctgttgcttatgaaaatgccctgcgggtgttcaacatcgtcttcacctccctcttctctctggaatgtgtgctgaaagtcatggcttttgggattctgaattatttccgcgatgcctggaacatcttcgactttgtgactgttctgggcagcatcaccgatatcctcgtgactgagtttggggcctggtcccgtgctactccacccagccccagaagctgagaagccatccctgagaggggggaaaagggccccaaatgcatcttctccgactcagcgggcagcgaggactcaccctgcagccgaacagtcccagctccctcccgtcctccccattcccgctcgccaaggggaataacttcatcaacctgagctttctccgcctcttccgagctgcccggctcatcaaacttctccgtcagggttacaccatccgcattcttctctggacctttgtgcagtccttcaaggccctgccttatgtctgtctgctgatcgccatgctcttcttcatctatgccatcattgggatgcaggtgtttggtaacattggcatcgacgtggaggacgaggacagtgatgaagatgagttccaaatcactgagcacaataacttccggaccttcttccaggccctcatgcttctcttccggagtgccaccggggaagcttggcacaacatcatgctttcctgcctcagcgggaaaccgtgtgataagaactctggcatcctgactcgagagtgtggcaatgaatttgcttatttttactttgtttccttcatcttcctctgctcgtttctgatgctgaatctctttgtcgccgtcatcatggacaactttgagtacctcacccgagactcctccatcctgggcccccaccacctggatgagtacgtgcgtgtctgggccgagtatgaccccgcagcttgcggtcggattcattataaggatatgtacagtttattacgagtaatatctccccctctcggcttaggcaagaaatgtcctcatagggttgcttgcaagcggcttctgcggatggacctgcccgtcgcagatgacaacaccgtccacttcaattccaccctcatggctctgatccgcacagccctggacatcaagattgccaagggaggagccgacaaacagcagatggacgctgagctgcggaaggagatgatggcgatttggcccaatctgtcccagaagacgctagacctgctggtcacacctcacaagtccacggacctcaccgtggggaagatctacgcagccatgatgatcatggagtactaccggcagagcaaggccaagaagctgcaggccatgcgcgaggagcaggtgcgctgttcgccgctctggggacatctgggctggggacagtggcttgcatgtcaccacgggaaccaactggaatatgagggtggctgagccccagggcaggtccctgaaaagtaggggctgtgcacagcagctcacacctgcaatctcagtgctttgagaggccagggcagagggatcgtttgagaccaggatgagaccaccctgggcaacacagtgagactccatctctacaaaataaaacattagccaggcatggtggtgcacacctgtagtcccagctatttaggaggccaagatgggaggatcacttgaggccaggagtgggagaccagtctgggcaacatagaaagacccatatctctacaaaaaaaaaataaaattagctgcatgtggcgccatgcacctgtggtcccagctacttgggaggctgaggcaggagaatcacttgaacctgggaggtggaggttgcagcaagccaagatcaagccactgcactccagcccgggtgataagagcagg

SEQ ID NO: 37 - DNA, 5744 bp, Homo sapiens
gatcagccaagcaggctgctgagaaagatgacctgaattgcagggatgcagaaagtgctgaagatgctttgtcagctgagaactggttaagagaaagtggctgatacagcaaccccgttcagtgtctgcttttgtggggagccctctgctcagaaaactgctcttcttggcacccacttttctccctcctgtctctgggccacccttcttctttccactgggtgggccatggatgcatggacttcagatagctcggacccctgggtgctgacgagatgggaccctcgggacccctggaggactcgcagtgctgaccactagccgcgtcgcctgagccccagcgctgatgcgatacagtttccccctcactgtgctggagggagaagaccctgggatttctgagcgaggcccgtggatgttgaagtcttcctgggtccccgactccatgctctcgcgccccagttactatgacgccctgcacaaccgcagctcggggcacgcccagcgccctgcaggacactcggcctccccggctcagcatctgcttcgagggcccccctctgaggcggcggggcggcgtggtggatcaccgagatgtcatcttggcccaccaggcccacaaaatccacagcaccccccaggccaggaggaaagaatgggaccaccatcatagcgaattgcatcgtcctcgcactggagcagcatctgcctgatgatgacaagaccccgatgtctgaacggctggatgacacagaaccatacttcattggaattttttgtttcgaggctggaattaaaatcattgcccttgggtttgccttccacaaaggctcctacttgaggaatggctggaatgtcatggactttgtggtggtgctaacgggcatcttggcgacagttgggacggagtttgacctacggacgctgagggcagttcgagtgctgcggccgctcaagctggtgtctggaatcccaagtttacaagtcgtcctgaagtcgatcatgaaggcgatgatccctttgctgcagatcggcctcctcctattttttgcaatccttatttttgcaatcatagggttagaattttatatgggaaaatttcataccacctgctttgaagaggggacagatgacattcagggtgagtctccggctccatgtgggacagaagagcccgcccgcacctgccccaatgggaccaaatgtcagccctactgggaagggcccaacaacgggatcactcagttcgacaacatcctgtttgcagtgctgactgttttccagtgcataaccatggaagggtggactgatctcctctacaatagcaacgatgcctcagggaacacttggaactggttgtacttcatccccctcatcatcatcggctccttttttatgctgaaccttgtgctgggtgtgctgtcaggggagtttgccaaagaaagggaacgggtggagaaccggcgggcttttctgaagctgaggcggcaacaacagattgaacgtgagctcaatgggtacatggaatggatctcaaaagcagaagaggtgatcctcgccgaggatgaaactgacggggagcagaggcatccctttgatggagctctgcggagaaccaccataaagaaaagcaagacagatttgctcaaccccgaagaggctgaggatcagctggctgatatagcctctgtgggttctcccttcgcccgagccagcattaaaagtgccaagctggagaactcgaccttttttcacaaaaaggagaggaggatgcgtttctacatccgccgcatggtcaaaactcaggccttctactggactgtactcagtttggtagctctcaacacgctgtgtgttgctattgttcactacaaccagcccgagtggctctccgacttcctttactatgcagaattcattttcttaggactctttatgtccgaaatgtttataaaaatgtacgggcttgggacgcggccttacttccactcttccttcaactgctttgactgtggggttatcattgggagcatcttcgaggtcatctgggctgtcataaaacctggcacatcctttggaatcagcgtgttacgagccctcaggttattgcgtattttcaaagtcacaaagtactgggcatctctcagaaacctggtcgtctctctcctcaactccatgaagtccatcatcagcctgttgtttctccttttcctgttcattgtcgtcttcgcccttttgggaatgcaactcttcggcggccagtttaatttcgatgaagggactcctcccaccaacttcgatacttttccagcagcaataatgacggtgtttcagatcctgacgggcgaagactggaacgaggtcatgtacgacgggatcaagtctcaggggggcgtgcagggcggcatggtgttctccatctatttcattgtactgacgctctttgggaactacaccctcctgaatgtgttcttggccatcgctgtggacaatctggccaacgcccaggagctcaccaaggacgagcaagaggaagaagaagcagcgaaccagaaacttgccctacagaaagccaaggaggtggcagaagtgagtcctctgtccgcggccaacatgtctatagctgtgaaagagcaacagaagaatcaaaagccagccaagtccgtgtgggagcagcggaccagtgagatgcgaaagcagaacttgctggccagccgggaggccctgtataacgaaatggacccggacgagcgctggaaggctgcctacacgcggcacctgcggccagacatgaagacgcacttggaccggccgctggtggtggacccgcaggagaaccgcaacaacaacaccaacaagagccgggcggccgagcccaccgtggaccagcgcctcggccagcagcgcgccgaggacttcctcaggaaacaggcccgctaccacgatcgggcccgggaccccagcggctcggcgggcctggacgcacggaggccctgggcgggaagccaggaggccgagctgagccgggagggaccctacggccgcgagtcggaccaccacgcccgggagggcagcctggagcaacccgggttctgggagggcgaggccgagcgaggcaaggccggggacccccaccggaggcacgtgcaccggcaggggggcagcagggagagccgcagcgggtccccgcgcacgggcgcggacggggagcatcgacgtcatcgcgcgcaccgcaggcccggggaggagggtccggaggacaaggcggagcggagggcgcggcaccgcgagggcagccggccggcccggggcggcgagggcgagggcgagggccccgacgggggcgagcgcaggagaaggcaccggcatggcgctccagccacgtacgagggggacgcgcggagggaggacaaggagcggaggcatcggaggaggaaagagaaccagggctccggggtccctgtgtcgggccccaacctgtcaaccacccggccaatccagcaggacctgggccgccaagacccacccctggcagaggatattgacaacatgaagaacaacaagctggccaccgcggagtcggccgctccccacggcagccttggccacgccggcctgccccagagcccagccaagatgggaaacagcaccgaccccggccccatgctggccatccctgccatggccaccaacccccagaacgccgccagccgccggacgcccaacaacccggggaacccatccaatcccggcccccccaagacccccgagaatagccttatcgtcaccaaccccagcggcacccagaccaattcagctaagactgccaggaaacccgaccacaccacagtggacatccccccagcctgcccaccccccctcaaccacaccgtcgtacaagtgaacaaaaacgccaacccagacccactgccaaaaaaagaggaagagaagaaggaggaggaggaagacgaccgtggggaagacggccctaagccaatgcctccctatagctccatgttcatcctgtccacgaccaacccccttcgccgcctgtgccattacatcctgaacctgcgctactttgagatgtgcatcctcatggtcattgccatgagcagcatcgccctggccgccgaggaccctgtgcagcccaacgcacctcggaacaacgtgctgcgatactttgactacgtttttacaggcgtctttacctttgagatggtgatcaagatgattgacctggggctcgtcctgcatcagggtgcctacttccgtgacctctggaatattctcgacttcatagtggtcagtggggccctggtagcctttgccttcactggcaatagcaaaggaaaagacatcaacacgattaaatccctccgagtcctccgggtgctacgacctcttaaaaccatcaagcggctgccaaagctcaaggctgtgtttgactgtgtggtgaactcacttaaaaacgtcttcaacatcctcatcgtctacatgctattcatgttcatcttcgccgtggtggctgtgcagctcttcaaggggaaattcttccactgcactgacgagtccaaagagtttgagaaagattgtcgaggcaaatacctcctctacgagaagaatgaggtgaaggcgcgagaccgggagtggaagaagtatgaattccattacgacaatgtgctgtgggctctgctgaccctcttcaccgtgtccacgggagaaggctggccacaggtcctcaagcattcggtggacgccacctttgagaaccagggccccagccccgggtaccgcatggagatgtccattttctacgtcgtctactttgtggtgttccccttcttctttgtcaatatctttgtggccttgatcatcatcaccttccaggagcaaggggacaagatgatggaggaatacagcctggagaaaaatgagagggcctgcattgatttcgccatcagcgccaagccgctgacccgacacatgccgcagaacaagcagagcttccagtaccgcatgtggcagttcgtggtgtctccgcctttcgagtacacgatcatggccatgatcgccctcaacaccatcgtgcttatgatgaagttctatggggcttctgttgcttatgaaaatgccctgcgggtgttcaacatcgtcttcacctccctcttctctctggaatgtgtgctgaaagtcatggcttttgggattctgaattatttccgcgatgcctggaacatcttcgactttgtgactgttctgggcagcatcaccgatatcctcgtgactgagtttgggaataacttcatcaacctgagctttctccgcctcttccgagctgcccggctcatcaaacttctccgtcagggttacaccatccgcattcttctctggacctttgtgcagtccttcaagtgccctacacccaccaccagacacactcacacccacacacgttctcagacacacacaagagtgcttgccggttataccaaaccctactattactgcctgcagaaatcaatttaaaaaaataataataacaataaacaattttaaaaaggacaaaaaaattaatgattgagaaaagaggcatttttttctgacatttggtcctgcttgaaacaacaaaagaagaagaaaaacccaccatcaccaccgattcctttgcttcttttttccttttttcctaccttgtttgaaaaccgtgggcttgggactgtgaattattgcatgacattcaa

SEQ ID NO: 38 - DNA, 6333 bp, Homo sapiens
atgcgtggactgagcccagaccgcaggctgcccgagcccgccccctgcccggctgcggggagccctgagcccaggtccgcgggccgccgccaacgccacgtcctggccctgccggaagaagaggcatggcggccccagcagtgcgctctgctcgaggccgacgcctcggacgaggtgggcatgctgccggcttccccgcgcgccgcctctggcttcgacaacttcttccaggtgcaggagggcgagggccagggctgggagggcgccatggcactggaggcgggctccagccctttcctgccggtgagccccgaggtcatgaagcggcggcgcgggggcctcatcgagcagcgcgacatcatcaaggcccacgaggcgcacaagatgcagagcaccccgcaggcccggcgcaaggaatgggagatggctcgcttcggggaggcggtggtcgccaggccagggtccggcgatggagactcggaccagagcaggaaccggcaaggaacccccgtgccggcctcggggcaggcggccgcctacaagcagacgaaagcacagagggcgcggactatggctttgtacaaccccattcccgtccggcagaactgtttcaccgtcaacagatccctgttcatcttcggagaagataacattgtcaggaaatatgccaagaagctcatcgattggccgccatttgagtacatgatcctggccaccatcattgccaactgcatcgtcctggccctggagcagcatcttcctgaggatgacaagacccccatgtcccgaagactggagaagacagaaccttatttcattgggatcttttgctttgaagctgggatcaaaattgtggccctggggttcatcttccataagggctcttacctccgcaatggctggaatgtcatggacttcatcgtggtcctcagtggcatcctggccactgcaggaacccacttcaatactcacgtggacctgaggaccctccgggctgtgcgtgtcctgcggcctttgaagctcgtgtcagggatacctagcctgcagattgtgttgaagtccatcatgaaggccatggtacctcttctgcagattggccttctgctcttctttgccatcctgatgtttgctatcattggtttggagttctacagtggcaagttacatcgagcgtgcttcatgaacaattcaggtattctagaaggatttgacccccctcacccatgtggtgtgcagggctgcccagctggttatgaatgcaaggactggatcggccccaatgatgggatcacccagtttgataacatcctttttgctgtgctgactgtcttccagtgcatcaccatggaagggtggaccactgtgctgtacaataccaatgatgccttaggagccacctggaattggctgtacttcatccccctcatcatcattggatccttctttgttctcaacctagtcctgggagtgctttccggggaatttgccaaagagagagagagagtggagaaccgaagggctttcatgaagctgcggcgccagcagcagattgagcgtgagctgaatggctaccgtgcctggatagacaaagcagaggaagtcatgctcgctgaagaaaataaaaatgctggaacatccgccttagaagtgcttcgaagggcaaccatcaagaggagccggacagaggccatgactcgagactccagtgatgagcactgtgttgatatctcctctgtgggcacacctctggcccgagccagtatcaaaagtgcaaaggtagacggggtctcttatttccggcacaaggaaaggcttctgcgcatctccattcgccacatggttaaatcccaggtgttttactggattgtgctgagccttgtggcactcaacactgcctgtgtggccattgtccatcacaaccagccccagtggctcacccacctcctctactatgcagaatttctgtttctgggactcttcctcttggagatgtccctgaagatgtatggcatggggcctcgcctttattttcactcttcattcaactgctttgattttggggtcacagtgggcagtatctttgaagtggtctgggcaatcttcagacctggtacgtcttttggaatcagtgtcttgcgagccctccggcttctaagaatatttaaaataaccaagtattgggcttccctacggaatttggtggtctccttgatgagctcaatgaagtctatcatcagtttgcttttcctcctcttcctcttcatcgttgtctttgctctcctaggaatgcagttatttggaggcaggtttaactttaatgatgggactccttcggcaaattttgataccttccctgcagccatcatgactgtgttccagatcctgacgggtgaggactggaatgaggtgatgtacaatgggatccgctcccagggtggggtcagctcaggcatgtggtctgccatctacttcattgtgctcaccttgtttggcaactacacgctactgaatgtgttcttggctatcgctgtggataatctcgccaacgcccaggaactgaccaaggatgaacaggaggaagaagaggccttcaaccagaaacatgcactgcagaaggccaaggaggtcagcccgatgtctgcacccaacatgccttcgatcgagagggagcggaggcgccggcaccacatgtccgtgtgggagcagcgtaccagccagctgaggaagcacatgcagatgtccagccaggaggccctcaacagagaggaggcgccgaccatgaacccgctcaaccccctcaacccgctcagctccctcaacccgctcaatgcccaccccagcctttatcggcgacccagggccattgagggcctggccctgggcctggccctggagaagttcgaggaggagcgcatcagccgtggggggtccctcaagggggatggaggggaccgatccagtgccctggacaaccagaggacccctttgtccctgggccagcgggagccaccatggctggccaggccctgtcatggaaactgtgacccgactcagcaggaggcagggggaggagaggctgtggtgacctttgaggaccgggccaggcacaggcagagccaacggcgcagccggcatcgccgcgtcaggacagaaggcaaggagtcctcttcagcctcccggagcaggtctgccagccaggaacgcagtctggatgaagccatgcccactgaaggggagaaggaccatgagctcaggggcaaccatggtgccaaggagccaacgatccaagaagagagagcccaggatttaaggaggaccaacagtctgatggtgtccagaggctccgggctggcaggaggccttgatgaggctgacacccccctagtcctgccccatcctgagctggaagtggggaagcacgtggtgctgacggagcaggagccagaaggcagcagtgagcaggccctgctggggaatgtgcagctagacatgggccgggtcatcagccagagcgagcctgacctctcctgcatcacggccaacacggacaaggccaccaccgagagcaccagcgtcaccgtcgccatccccgacgtggaccccttggtggactcaaccgtggtgcacattagcaacaagacggatggggaagccagtcccttgaaggaggcagagatcagagaggatgaggaggaggtggagaagaagaagcagaagaaggagaagcgtgagacaggcaaagccatggtgccccacagctcaatgttcatcttcagcaccaccaacccgatccggagggcctgccactacatcgtgaacctgcgctactttgagatgtgcatcctcctggtgattgcagccagcagcatcgccctggcggcagaggaccccgtcctgaccaactcggagcgcaacaaagtcctgaggtattttgactatgtgttcacgggcgtgttcacctttgagatggttataaagatgatagaccaaggcttgatcctgcaggatgggtcctacttccgagacttgtggaacatcctggactttgtggtggtcgttggcgcattggtggcctttgctctggcgaacgctttgggaaccaacaaaggacgggacatcaagaccatcaagtctctgcgggtgctccgagttctaaggccactgaaaaccatcaagcgcttgcccaagctcaaggccgtcttcgactgcgtagtgacctccttgaagaatgtcttcaacatactcattgtgtacaagctcttcatgttcatctttgctgtcatcgcagttcagctcttcaagggaaagttcttttattgcacggacagttccaaggacacagagaaggagtgcataggcaactatgtagatcacgagaaaaacaagatggaggtgaagggccgggaatggaagcgccatgaattccactacgacaacattatctgggccctgctgaccctcttcaccgtctccacaggggaaggatggcctcaagttctgcagcactctgtagatgtgacagaggaagaccgaggcccaagccgcagcaaccgcatggagatgtctatcttttatgtagtctactttgtggtcttccccttcttctttgtcaatatctttgtggctctcatcatcatcaccttccaggagcaaggggataagatgatggaggagtgcagcctggagaagaatgagagggcgtgcatcgacttcgccatcagcgccaaacctctcacccgctacatgccgcagaacagacacaccttccagtaccgcgtgtggcactttgtggtgtctccgtcctttgagtacaccattatggccatgatcgccttgaatactgttgtgctgatgatgaagtattattctgctccctgtacctatgagctggccctgaagtacctgaatatcgccttcaccatggtgttttccctggaatgtgtcctgaaggtcatcgcttttggctttttgaactatttccgagacacctggaatatctttgacttcatcaccgtgattggcagtatcacagaaattatcctgacagacagcaagctggtgaacaccagtggcttcaatatgagctttctgaagctcttccgagctgcccgcctcataaagctcctgcgtcagggctataccatacgcattttgctgtggacctttgtgcagtcctttaaggccctcccttatgtctgccttttaattgccatgcttttcttcatttatgccatcattgggatgcaggtatttggaaacataaaattagacgaggagagtcacatcaaccggcacaacaacttccggagtttctttgggtccctaatgctactcttcaggagtgccacaggtgaggcctggcaggagattatgctgtcatgccttggggagaagggctgtgagcctgacaccaccgcaccatcagggcagaacgagaatgaacgctgcggcaccgatctggcctacgtgtactttgtctccttcatcttcttctgctccttcttgatgctcaacctgtttgtggccgtcatcatggacaactttgagtacctgactcgggactcctccatcctggggcctcaccacttggacgagtttgtccgcgtctgggcagaatatgaccgagcagcatggtgcgtaggcccctcggccgccccagcggggcccagagcaaaggtctctggagttcccagggaagaggctggaattggagccacccaaatgcctgcctgttacagaaggaaaggagattcctcttgattgtggcccatagaagaggctctggtatcaagccagtcaccaaggacttctgtatcctcctttcccctctctttccttctgtgacagggttttccctttgtgggctggtctcatcatccagtcctcacctcagattatttgggctcagtcccaagagaactttccaataatctttttctgccaatggttagtggactcctttgagttatcagggggtttgacaagggtttttggccagctggacatctggccaccatgatcagtgactgtgttttctctttctcgttcctctcaacagatacagttggatataactctgaaattattttttaaaaaccaaacaagttgttcttccaactgttcccttaaatatttgtggatttttattacatggaactaaattaaatggtaggaattggtgaagataacttctttactgtctcttttgctgtttagtagttctgaagtgatagcgtgccttctaggctctagagcagggattggcaaactacatcccatgggcaaaattcagcccattgtctgtttttgcaaataaagttttattgaaagaca

SEQ ID NO: 39 - DNA, 5772 bp, Homo sapiens
ctccaaagctgggggaagagaggggggttgtgtgcagatggcccttcaatctcgaaagaaagatgtcggaatctgaaggcgggaaagacaccaccccagagcccagtccagccaatggggcaggccctggtcccgaatgggggctgtgccccgggcccccagctgtggaaggtgaaagcagtggggcatcaggcctagggacccctaagcgaagaaaccagcacagcaagcacaagacagtggcagtggccagtgcccagcggtcacctcgggcactcttctgcctcaccctggccaatcctctgcgacggtcctgcatcagcatcgtggagtggaagcccttcgacatcctcatcctgctgaccatctttgccaactgcgtggccctgggagtttacatccccttccctgaggacgactccaacactgccaaccacaacctggagcaggtggagtacgtattcctggtgattttcactgtggagacggtgctcaagatcgtggcctacgggctggtgctccaccccagcgcctacatccgcaatggctggaacctactcgacttcatcatcgtcgtggtcgggctgttcagcgttctgctggagcagggccccggacggccaggcgacgccccgcacaccgggggaaagccaggaggcttcgatgtgaaggcattgagggcgtttcgggtgctgcggccactgaggctggtgtctggggtcccgagcctgcacatagtgctcaattccatcatgaaggctctggtgccgctgctgcacattgcactgctcgtgctcttcgtcatcatcatttatgccatcattgggctcgagctgttccttggacgaatgcacaagacgtgctacttcctgggatccgacatggaagcggaggaggacccatcgccctgtgcgtcttcgggatcagggcgtgcgtgcacgctgaaccagactgagtgccgcgggcgctggccagggcccaatggaggcatcaccaactttgacaacttcttcttcgccatgctgacagtcttccagtgtgtcaccatggaaggctggaccgatgtgctctactggatgcaagatgccatggggtatgaactgccctgggtgtactttgtgagccttgtcatctttgggtccttcttcgtcctcaaccttgtgcttggcgtcctgagtggggagttctccaaggagagagagaaagcgaaagctcgcggggacttccagaagcagcgggagaagcagcagatggaggaagacctgcggggctacctggactggatcactcaagccgaagagctggacatggaggacccctccgccgatgacaaccttggttctatggctgaagagggccgggcgggccatcggccacagctggccgagctgaccaataggaggcgtggacgtctgcgctggttcagtcattctactcgctccacacactccaccagcagccatgccagcctcccagccagtgacaccggttccatgacagagacccaaggcgatgaggatgaggaggagggggctctggccagctgtacacgctgcctaaacaagatcatgaaaaccagagtctgccgccgcctccgccgagccaaccgggtccttcgggcacgctgccgtcgggcagtgaagtccaatgcctgctactgggctgtgctgttgctcgtcttcctcaacacgttgaccatcgcctctgagcaccacgggcagcctgtgtggctcacccagatccaggagtatgccaacaaagtgttgctctgtctgttcacggtggagatgcttctcaaattgtacggtctgggcccctctgcctatgtgtcttccttcttcaaccgctttgactgctttgtggtctgtgggggcatcctagagaccaccttggtggaggtgggcgccatgcagcccttgggcatctcagtgctccgatgtgtgcgcctcctcaggatctttaaggtcaccagacactgggcttctctgagcaatctggtggcatccctgctcaattcaatgaaatccatcgcatccttgctgcttctcctcttcctcttcatcattatcttctccctgcttggcatgcagctgtttgggggcaagttcaactttgaccagacccacaccaagcgaagcacctttgacacgttcccccaggccctcctcactgtctttcagatcctgacaggtgaggactggaacgtggtcatgtatgatggtatcatggcatatggtggccccttcttcccaggaatgttggtgtgcatctatttcatcattctcttcatctgtggcaactacatcctgttgaacgtgtttcttgccattgctgtggacaacctggccagtggagatgcaggcactgccaaggacaagggcggggagaagagcaatgagaaggatctcccacaggagaatgaaggcctggtgcctggtgtggagaaagaggaagaggagggtgcaaggagggaaggagcagacatggaggaggaggaggaggaggaagaagaggaagaagaggaagaagaggaagagggtgcagggggtgtggaactcctgcaggaagttgtacccaaggagaaggtggtacccatccctgagggcagcgccttcttctgcctcagccaaaccaacccgctgaggaagggctgccacaccctcatccaccatcatgtcttcaccaatcttatcctggtgttcatcatcctcagcagtgtgtccctggccgctgaggaccccatccgagcccactccttccgcaaccatattctgggttacttcgattatgccttcacctccattttcactgtggagattctactaaagatgacagtgtttggggccttcctgcaccgcggctccttctgccgtagctggtttaatatgttggatctgctggtggtcagtgtgtccctcatctcctttggcatccactccagcgccatctcggtggtgaagattctgcgagtactccgagtactgcggcccctccgagccatcaacagggccaagggactcaagcatgtggtgcagtgtgtatttgtggccatccggaccatcggaaacatcatgattgtcaccacacttctgcaatttatgttcgcctgcatcggggtgcagctcttcaaggggaaattctacacctgcacggacgaggccaaacacacccctcaagaatgcaagggctccttcctggtatacccagatggagacgtgtcacggcccctggtccgggagcggctctgggtcaacagtgatttcaactttgacaatgtcctttcagccatgatggccctgttcactgtctccacctttgaaggctggcctgcactgctatacaaggccatcgatgcatatgcagaggaccatggccccatctataattaccgtgtggagatctcagtgttcttcattgtctacatcatcatcattgcgttcttcatgatgaacatcttcgtgggcttcgtcatcatcactttccgtgcccagggcgagcaggagtaccaaaactgtgagctggacaagaaccagcgtcaatgtgtggaatatgccctcaaggcccagccactccgccgttacatccccaagaacccgcatcagtatcgtgtgtgggccactgtgaactctgctgcctttgagtacctgatgttcctgctcatcctgctcaacacagttgccctagccatgcagcactatgagcagactgctcccttcaactatgccatggacatcctcaacatggtcttcactggcctcttcactattgagatggtgctcaaaatcatcgccttcaagcccaagcattacttcactgatgcctggaacacgtttgacgctcttattgtggtgggcagcatagtggatattgccgtcactgaagtcaataatggtggccaccttggcgagagctctgaggacagctcccgcatttccattaccttctttcgcctcttccgagttatgcggctggtcaagcttctcagtaagggtgaagggatccgcacattgctctggacattcatcaagtccttccaggccttgccctatgtggctcttctcatcgcaatgatattcttcatctatgccgtcattggcatgcagatgttcggcaaggtggctcttcaggatggcacacagataaaccgaaacaacaacttccagacctttccacaggctgtgctgcttctgttcaggtgtgccactggtgaggcatggcaggagataatgcttgccagccttcccggaaatcggtgtgatcctgagtctgacttcggccctggtgaagagtttacctgtggtagcaattttgccatcgcctatttcatcagcttcttcatgctctgtgccttcctgatcataaatctctttgtggctgtgatcatggacaactttgattatctcaccagagattggtccatcctgggcccccatcaccttgatgaattcaagaggatctggtctgaatatgaccctggggccaagtatgccctctatacccttacctagaatccaggggacaatgtattgccctacacagtcccctagcccccaaacctccgactgctgcatctcattacccagtcaatagatgccccaaagtttccactgccccatcctctgccctctctgactgccctccagttcttccctggcaagctctggggtattggtaggaggaggtagtgatgagctggtggggccttgagaaagggctagtgggggcatcgccaatccagtggtacctccccaactcctccaggggccgcatcaaacacttggatgtggttgccctgctgagacgtatccagccccctctgggatttgggaagctgtgcccacaccgagtggcctgcaagagacttgtggcaatgaacatgcccctcaactcagatgggacggtgacattcaacgccacactctttgccctggtccggacatccctgaagatcaaaacagaagggaacctggagcaagccaaccaggagctgcggattgtcatcaaaaagatctggaagcggatgaaacagaagctgctagatgaggtcatccccccaccagacgaggaggaggtcaccgtgggcaaattctacgccacatttctgatccaggactatttccgcaaattccggcggaggaaagaaaaagggctactaggcaacgacgccgcccctagcacctcttccgcccttcaggctggtctgcggagcctgcaggacttgggtcctgagatgcggcaggccctcacctgtgacacagaggaggaggaagaagaggggcaggagggagtggaggaggaagatgaaaaggacttggaaactaacaaagtggggacaagttttcactctcccaggaacttgattgtaaaatacttcgtcaatcccctgagtgattttgacactgcttctgggaagaagctcccccagagaagccccctctgcaatagaaaaatatttatttgaggctgggagtggtggctcatgcctataatcccagcactttgggagtccagggtggaaggatcgcttgaaccctagggttcaagaccagtcctggcaaaatagtgaaaccgcctctctacaaaaaaatttaaaaattagctaggagtggtggtgcaagcctgtagtcccagctacttgggaggctgaggcaggaggattgcttgaacctgggaggatgaggccacagtgagctgtgatcatgccactgcactcccgcctggtgacaggacaagaccctatcgcaaatatttatttatttatttacgtattta

SEQ ID NO: 40 - DNA, 7520 bp, Homo sapiens
ccgccctccgccgctgccccccttttcgttcgccctctcggggcggcttcgccgaaggtagcgccgaatccggcaaccggagcctgggcgcgaagcgaagaagccggaacaaagtgagggggagccggccggctggcccgggaagccccaggggcgcaggggaagcgggactcgcgccgggcggggtttccctgcgccccggcgccccgcgggcagcatgcccctgcgggcagggggagctgggctgaactggccctcccgggggctcagcttgcgccctagagcccaccagatgtgcccccgccggggcccccgggttgcgtgaggacacctcctctgaggggcgccgcttgcccctctccggatcgcccggggccccggctggccagaggatggacgaggaggaggatggagcgggcgccgaggagtcgggacagccccggagcttcatgcggctcaacgacctgtcgggggccgggggccggccggggccggggtcagcagaaaaggacccgggcagcgcggactccgaggcggaggggctgccgtacccggcgctggccccggtggttttcttctacttgagccaggacagccgcccgcggagctggtgtctccgcacggtctgtaacccctggtttgagcgcatcagcatgttggtcatccttctcaactgcgtgaccctgggcatgttccggccatgcgaggacatcgcctgtgactcccagcgctgccggatcctgcaggcctttgatgacttcatctttgccttctttgccgtggagatggtggtgaagatggtggccttgggcatctttgggaaaaagtgttacctgggagacacttggaaccggcttgactttttcatcgtcatcgcagggatgctggagtactcgctggacctgcagaacgtcagcttctcagctgtcaggacagtccgtgtgctgcgaccgctcagggccattaaccgggtgcccagcatgcgcatccttgtcacgttgctgctggatacgctgcccatgctgggcaacgtcctgctgctctgcttcttcgtcttcttcatcttcggcatcgtcggcgtccagctgtgggcagggctgcttcggaaccgatgcttcctacctgagaatttcagcctccccctgagcgtggacctggagcgctattaccagacagagaacgaggatgagagccccttcatctgctcccagccacgcgagaacggcatgcggtcctgcagaagcgtgcccacgctgcgcggggacgggggcggtggcccaccttgcggtctggactatgaggcctacaacagctccagcaacaccacctgtgtcaactggaaccagtactacaccaactgctcagcgggggagcacaaccccttcaagggcgccatcaactttgacaacattggctatgcctggatcgccatcttccaggtcatcacgctggagggctgggtcgacatcatgtactttgtgatggatgctcattccttctacaatttcatctacttcatcctcctcatcatcgtgggctccttcttcatgatcaacctgtgcctggtggtgattgccacgcagttctcagagaccaagcagcgggaaagccagctgatgcgggagcagcgtgtgcggttcctgtccaacgccagcaccctggctagcttctctgagcccggcagctgctatgaggagctgctcaagtacctggtgtacatccttcgtaaggcagcccgcaggctggctcaggtctctcgggcagcaggtgtgcgggttgggctgctcagcagcccagcacccctcgggggccaggagacccagcccagcagcagctgctctcgctcccaccgccgcctatccgtccaccacctggtgcaccaccaccaccaccatcaccaccactaccacctgggcaatgggacgctcagggccccccgggccagcccggagatccaggacagggatgccaatgggtcccgccggctcatgctgccaccaccctcgacgcctgccctctccggggccccccctggtggcgcagagtctgtgcacagcttctaccatgccgactgccacttagagccagtccgctgccaggcgccccctcccaggtccccatctgaggcatccggcaggactgtgggcagcgggaaggtgtatcccaccgtgcacaccagccctccaccggagacgctgaaggagaaggcactagtagaggtggctgccagctctgggcccccaaccctcaccagcctcaacatcccacccgggccctacagctccatgcacaagctgctggagacacagagtacaggtgcctgccaaagctcttgcaagatctccagcccttgcttgaaagcagacagtggagcctgtggtccagacagctgcccctactgtgcccgggccggggcaggggaggtggagctcgccgaccgtgaaatgcctgactcagacagcgaggcagtttatgagttcacacaggatgcccagcacagcgacctccgggacccccacagccggcggcaacggagcctgggcccagatgcagagcccagctctgtgctggccttctggaggctaatctgtgacaccttccgaaagattgtggacagcaagtactttggccggggaatcatgatcgccatcctggtcaacacactcagcatgggcatcgaataccacgagcagcccgaggagcttaccaacgccctagaaatcagcaacatcgtcttcaccagcctctttgccctggagatgctgctgaagctgcttgtgtatggtccctttggctacatcaagaatccctacaacatcttcgatggtgtcattgtggtcatcagcgtgtgggagatcgtgggccagcaggggggcggcctgtcggtgctgcggaccttccgcctgatgcgtgtgctgaagctggtgcgcttcctgccggcgctgcagcggcagctggtggtgctcatgaagaccatggacaacgtggccaccttctgcatgctgcttatgctcttcatcttcatcttcagcatcctgggcatgcatctcttcggctgcaagtttgcctctgagcgggatggggacaccctgccagaccggaagaattttgactccttgctctgggccatcgtcactgtctttcagatcctgacccaggaggactggaacaaagtcctctacaatggtatggcctccacgtcgtcctgggcggccctttatttcattgccctcatgaccttcggcaactacgtgctcttcaatttgctggtcgccattctggtggagggcttccaggcggagggagatgccaacaagtccgaatcagagcccgatttcttctcacccagcctggatggtgatggggacaggaagaagtgcttggccttggtgtccctgggagagcacccggagctgcggaagagcctgctgccgcctctcatcatccacacggccgccacacccatgtcgctgcccaagagcaccagcacgggcctgggcgaggcgctgggccctgcgtcgcgccgcaccagcagcagcgggtcggcagagcctggggcggcccacgagatgaagtcaccgcccagcgcccgcagctctccgcacagcccctggagcgctgcaagcagctggaccagcaggcgctccagccggaacagcctcggccgtgcacccagcctgaagcggagaagcccaagtggagagcggcggtccctgttgtcgggagaaggccaggagagccaggatgaagaggagagctcagaagaggagcgggccagccctgcgggcagtgaccatcgccacagggggtccctggagcgggaggccaagagttcctttgacctgccagacacactgcaggtgccagggctgcatcgcactgccagtggccgagggtctgcttctgagcaccaggactgcaatggcaagtcggcttcagggcgcctggcccgggccctgcggcctgatgaccccccactggatggggatgacgccgatgacgagggcaacctgagcaaaggggaacgggtccgcgcgtggatccgagcccgactccctgcctgctgcctcgagcgagactcctggtcagcctacatcttccctcctcagtccaggttccgcctcctgtgtcaccggatcatcacccacaagatgttcgaccacgtggtccttgtcatcatcttccttaactgcatcaccatcgccatggagcgccccaaaattgacccccacagcgctgaacgcatcttcctgaccctctccaattacatcttcaccgcagtctttctggctgaaatgacagtgaaggtggtggcactgggctggtgcttcggggagcaggcgtacctgcggagcagttggaacgtgctggacgggctgttggtgctcatctccgtcatcgacattctggtgtccatggtctctgacagcggcaccaagatcctgggcatgctgagggtgctgcggctgctgcggaccctgcgcccgctcagggtgatcagccgggcgcaggggctgaagctggtggtggagacgctgatgtcctcactgaaacccatcggcaacattgtagtcatctgctgtgccttcttcatcattttcggcatcttgggggtgcagctcttcaaagggaagtttttcgtgtgccagggcgaggataccaggaacatcaccaataaatcggactgtgccgaggccagttaccggtgggtccggcacaagtacaactttgacaaccttggccaggccctgatgtccctgttcgttttggcctccaaggatggttgggtggacatcatgtacgatgggctggatgctgtgggcgtggaccagcagcccatcatgaaccacaacccctggatgctgctgtacttcatctcgttcctgctcattgtggccttctttgtcctgaacatgtttgtgggtgtggtggtggagaacttccacaagtgtcggcagcaccaggaggaagaggaggcccggcggcgggaggagaagcgcctacgaagactggagaaaaagagaaggagtaaggagaagcagatggctgatctaatgctggacgatgtaattgcttccggcagctcagccagcgctgcgtcagaagcccagtgcaaaccttactactccgactactcccgcttccggctcctcgtccaccacttgtgcaccagccactacctggacctcttcatcacaggtgtcatcgggctgaacgtggtcaccatggccatggagcactaccagcagccccagattctggatgaggctctgaagatctgcaactacatcttcactgtcatctttgtcttggagtcagttttcaaacttgtggcctttggtttccgtcggttcttccaggacaggtggaaccagctggacctggccattgtgctgctgtccatcatgggcatcacgctggaggaaatcgaggtcaacgcctcgctgcccatcaaccccaccatcatccgcatcatgagggtgctgcgcattgcccgagtgctgaagctgctgaagatggctgtgggcatgcgggcgctgctggacacggtgatgcaggccctgccccaggtggggaacctgggacttctcttcatgttgttgtttttcatctttgcagctctgggcgtggagctctttggagacctggagtgtgacgagacacacccctgtgagggcctgggccgtcatgccacctttcggaactttggcatggccttcctaaccctcttccgagtctccacaggtgacaattggaatggcattatgaaggacaccctccgggactgtgaccaggagtccacctgctacaacacggtcatctcgcctatctactttgtgtccttcgtgctgacggcccagttcgtgctagtcaacgtggtgatcgccgtgctgatgaagcacctggaggagagcaacaaggaggccaaggaggaggccgagctagaggctgagctggagctggagatgaagaccctcagcccccagccccactcgccactgggcagccccttcctctggcctggggtcgagggccccgacagccccgacagccccaagcctggggctctgcacccagcggcccacgcgagatcagcctcccacttttccctggagcaccccacgatgcagccccaccccacggagctgccaggaccagacttactgactgtgcggaagtctggggtcagccgaacgcactctctgcccaatgacagctacatgtgtcggcatgggagcactgccgaggggcccctgggacacaggggctgggggctccccaaagctcagtcaggctccgtcttgtccgttcactcccagccagcagataccagctacatcctgcagcttcccaaagatgcacctcatctgctccagccccacagcgccccaacctggggcaccatccccaaactgcccccaccaggacgctcccctttggctcagaggccactcaggcgccaggcagcaataaggactgactccttggacgttcagggtctgggcagccgggaagacctgctggcagaggtgagtgggccctccccgcccctggcccgggcctactctttctggggccagtcaagtacccaggcacagcagcactcccgcagccacagcaagatctccaagcacatgaccccgccagccccttgcccaggcccagaacccaactggggcaagggccctccagagaccagaagcagcttagagttggacacggagctgagctggatttcaggagacctcctgccccctggcggccaggaggagcccccatccccacgggacctgaagaagtgctacagcgtggaggcccagagctgccagcgccggcccacgtcctggctggatgagcagaggagacactctatcgccgtcagctgcctggacagcggctcccaaccccacctgggcacagacccctctaaccttgggggccagcctcttggggggcctgggagccggcccaagaaaaaactcagcccgcctagtatcaccatagacccccccgagagccaaggtcctcggaccccgcccagccctggtatctgcctccggaggagggctccgtccagcgactccaaggatcccttggcctctggcccccctgacagcatggctgcctcgccctccccaaagaaagatgtgctgagtctctccggtttatcctctgacccagcagacctggacccctgagtcctgccccactttcccactcacctttctccactgggtgccaagtcctagctcctcctcctgggctatattcctgacaaaagttccatatagacaccaaggaggcggaggcgctcctccctgcctcagtggctctgggtacctgcaagcagaacttccaaagagagttaaaagcagcagccccggcaactctggctccaggcagaaggagaggcccggtgcagctgaggttcccgacaccagaagctgttgggagaaagcaatacgtttgtgcagaatctctatgtatattctattttattaaattaattgaatctagta

SEQ ID NO: 41 - DNA, 5337 bp, Homo sapiens
ccgccctccgccgctgccccccttttcgttcgccctctcggggcggcttcgccgaaggtagcgccgaatccggcaaccggagcctgggcgcgaagcgaagaagccggaacaaagtgagggggagccggccggctggcccgggaagccccaggggcgcaggggaagcgggactcgcgccgggcggggtttccctgcgccccggcgccccgcgggcagcatgcccctgcgggcagggggagctgggctgaactggccctcccgggggctcagcttgcgccctagagcccaccagatgtgcccccgccggggcccccgggttgcgtgaggacacctcctctgaggggcgccgcttgcccctctccggatcgcccggggccccggctggccagaggatggacgaggaggaggatggagcgggcgccgaggagtcgggacagccccggagcttcatgcggctcaacgacctgtcgggggccgggggccggccggggccggggtcagcagaaaaggacccgggcagcgcggactccgaggcggaggggctgccgtacccggcgctggccccggtggttttcttctacttgagccaggacagccgcccgcggagctggtgtctccgcacggtctgtaacccctggtttgagcgcatcagcatgttggtcatccttctcaactgcgtgaccctgggcatgttccggccatgcgaggacatcgcctgtgactcccagcgctgccggatcctgcaggcctttgatgacttcatctttgccttctttgccgtggagatggtggtgaagatggtggccttgggcatctttgggaaaaagtgttacctgggagacacttggaaccggcttgactttttcatcgtcatcgcagggatgctggagtactcgctggacctgcagaacgtcagcttctcagctgtcaggacagtccgtgtgctgcgaccgctcagggccattaaccgggtgcccagcatgcgcatccttgtcacgttgctgctggatacgctgcccatgctgggcaacgtcctgctgctctgcttcttcgtcttcttcatcttcggcatcgtcggcgtccagctgtgggcagggctgcttcggaaccgatgcttcctacctgagaatttcagcctccccctgagcgtggacctggagcgctattaccagacagagaacgaggatgagagccccttcatctgctcccagccacgcgagaacggcatgcggtcctgcagaagcgtgcccacgctgcgcggggacgggggcggtggcccaccttgcggtctggactatgaggcctacaacagctccagcaacaccacctgtgtcaactggaaccagtactacaccaactgctcagcgggggagcacaaccccttcaagggcgccatcaactttgacaacattggctatgcctggatcgccatcttccaggtcatcacgctggagggctgggtcgacatcatgtactttgtgatggatgctcattccttctacaatttcatctacttcatcctcctcatcatcgtgggctccttcttcatgatcaacctgtgcctggtggtgattgccacgcagttctcagagaccaagcagcgggaaagccagctgatgcgggagcagcgtgtgcggttcctgtccaacgccagcaccctggctagcttctctgagcccggcagctgctatgaggagctgctcaagtacctggtgtacatccttcgtaaggcagcccgcaggctggctcaggtctctcgggcagcaggtgtgcgggttgggctgctcagcagcccagcacccctcgggggccaggagacccagcccagcagcagctgctctcgctcccaccgccgcctatccgtccaccacctggtgcaccaccaccaccaccatcaccaccactaccacctgggcaatgggacgctcagggccccccgggccagcccggagatccaggacagggatgccaatgggtcccgccggctcatgctgccaccaccctcgacgcctgccctctccggggccccccctggtggcgcagagtctgtgcacagcttctaccatgccgactgccacttagagccagtccgctgccaggcgccccctcccaggtccccatctgaggcatccggcaggactgtgggcagcgggaaggtgtatcccaccgtgcacaccagccctccaccggagacgctgaaggagaaggcactagtagaggtggctgccagctctgggcccccaaccctcaccagcctcaacatcccacccgggccctacagctccatgcacaagctgctggagacacagagtacaggtgcctgccaaagctcttgcaagatctccagcccttgcttgaaagcagacagtggagcctgtggtccagacagctgcccctactgtgcccgggccggggcaggggaggtggagctcgccgaccgtgaaatgcctgactcagacagcgaggcagtttatgagttcacacaggatgcccagcacagcgacctccgggacccccacagccggcggcaacggagcctgggcccagatgcagagcccagctctgtgctggccttctggaggctaatctgtgacaccttccgaaagattgtggacagcaagtactttggccggggaatcatgatcgccatcctggtcaacacactcagcatgggcatcgaataccacgagcagcccgaggagcttaccaacgccctagaaatcagcaacatcgtcttcaccagcctctttgccctggagatgctgctgaagctgcttgtgtatggtccctttggctacatcaagaatccctacaacatcttcgatggtgtcattgtggtcatcagcgtgtgggagatcgtgggccagcaggggggcggcctgtcggtgctgcggaccttccgcctgatgcgtgtgctgaagctggtgcgcttcctgccggcgctgcagcggcagctggtggtgctcatgaagaccatggacaacgtggccaccttctgcatgctgcttatgctcttcatcttcatcttcagcatcctgggcatgcatctcttcggctgcaagtttgcctctgagcgggatggggacaccctgccagaccggaagaattttgactccttgctctgggccatcgtcactgtctttcagatcctgacccaggaggactggaacaaagtcctctacaatggtatggcctccacgtcgtcctgggcggccctttatttcattgccctcatgaccttcggcaactacgtgctcttcaatttgctggtcgccattctggtggagggcttccaggcggagggagatgccaacaagtccgaatcagagcccgatttcttctcacccagcctggatggtgatggggacaggaagaagtgcttggccttggtgtccctgggagagcacccggagctgcggaagagcctgctgccgcctctcatcatccacacggccgccacacccatgtcgctgcccaagagcaccagcacgggcctgggcgaggcgctgggccctgcgtcgcgccgcaccagcagcagcgggtcggcagagcctggggcggcccacgagatgaagtcaccgcccagcgcccgcagctctccgcacagcccctggagcgctgcaagcagctggaccagcaggcgctccagccggaacagcctcggccgtgcacccagcctgaagcggagaagcccaagtggagagcggcggtccctgttgtcgggagaaggccaggagagccaggatgaagaggagagctcagaagaggagcgggccagccctgcgggcagtgaccatcgccacagggggtccctggagcgggaggccaagagttcctttgacctgccagacacactgcaggtgccagggctgcatcgcactgccagtggccgagggtctgcttctgagcaccaggactgcaatggcaagtcggcttcagggcgcctggcccgggccctgcggcctgatgaccccccactggatggggatgacgccgatgacgagggcaacctgagcaaaggggaacgggtccgcgcgtggatccgagcccgactccctgcctgctgcctcgagcgagactcctggtcagcctacatcttccctcctcagtccaggttccgcctcctgtgtcaccggatcatcacccacaagatgttcgaccacgtggtccttgtcatcatcttccttaactgcatcaccatcgccatggagcgccccaaaattgacccccacagcgctgaacgcatcttcctgaccctctccaattacatcttcaccgcagtctttctggctgaaatgacagtgaaggtggtggcactgggctggtgcttcggggagcaggcgtacctgcggagcagttggaacgtgctggacgggctgttggtgctcatctccgtcatcgacattctggtgtccatggtctctgacagcggcaccaagatcctgggcatgctgagggtgctgcggctgctgcggaccctgcgcccgctcagggtgatcagccgggcgcaggggctgaagctggtggtggagacgctgatgtcctcactgaaacccatcggcaacattgtagtcatctgctgtgccttcttcatcattttcggcatcttgggggtgcagctcttcaaagggaagtttttcgtgtgccagggcgaggataccaggaacatcaccaataaatcggactgtgccgaggccagttaccggtgggtccggcacaagtacaactttgacaaccttggccaggccctgatgtccctgttcgttttggcctccaaggatggttgggtggacatcatgtacgatgggctggatgctgtgggcgtggaccagcaggtagggctgaggtgggcaggatccatctgtgggcycaggtcactcmgcatgggcysmttccaggacagaaagagcaasscagggtscaaaatgccatgaaagaagcatcatattttacagcagaggcygttgctggtacctgtgggccaaatctgggsatgttttattggtctacaacatgtttaacatgttttgaattagtgatgaatatttttaaactggtgaatttgggctgtgtgcagtggctcacacctgtaatgccagtgcattgggaggcctaggcaagaggatcacttgaggccaggagttggagaccagcctgggcatcatagcaagacccccagctctacaaaaaataaaaacaattagccgggtgtggtggtatcatctggagtcccagctgaggtgggaggatctcttgagcccaggagtttgaggctgcaataagctgtgatcgcaccactgcactccagcctaagcaatagaacaagaccctgtctct

SEQ ID NO: 42 - DNA, 3383 bp, Homo sapiens
gggcgagcgcctccgtccccggatgtgagctccggctgcccgcggtcccgagccagcggcgcgcgggcggcggcggcgggcaccgggcaccgcggcgggcgggcagacgggcgggcatggggggagcgccgagcggccccggcggccgggccggcatcaccgcggcgtctctccgctagaggaggggacaagccagttctcctttgcagcaaaaaattacatgtatatattattaagataatatatacattggattttatttttttaaaaagtttattttgctccatttttgaaaaagagagagcttgggtggcgagcggtttttttttwaaatcaattatccttattttctgttatttgtccccgtccctccccacccccctgctgaagcgagaataagggcagggaccgcggctcctacctcttggtgatccccttccccattccgcccccgcctcaacgcccagcacagtgccctgcacacagtagtcgctcaataaatgttcgtggatgatgatgatgatgatgatgaaaaaaatgcagcatcaacggcagcagcaagcggaccacgcgaacgaggcaaactatgcaagaggcaccagacttcctctttctggtgaaggaccaacttctcagccgaatagctccaagcaaactgtcctgtcttggcaagctgcaatcgatgctgctagacaggccaaggctgcccaaactatgagcacctctgcacccccacctgtaggatctctctcccaaagaaaacgtcagcaatacgccaagagcaaaaaacagggtaactcgtccaacagccgacctgcccgcgcccttttctgtttatcactcaataaccccatccgaagagcctgcattagtatagtggaatggaaaccatttgacatatttatattattggctatttttgccaattgtgtggccttagctatttacatcccattccctgaagatgattctaattcaacaaatcataacttggaaaaagtagaatatgccttcctgattatttttacagtcgagacatttttgaagattatagcgtatggattattgctacatcctaatgcttatgttaggaatggatggaatttactggattttgttatagtaatagtaggattgtttagtgtaattttggaacaattaaccaaagaaacagaaggcgggaaccactcaagcggcaaatctggaggctttgatgtcaaagccctccgtgcctttcgagtgttgcgaccacttcgactagtgtcaggrgtgcccagtttacaagttgtcctgaactccattataaaagccatggttcccctccttcacatagcccttttggtattatttgtaatcataatctatgctattataggattggaactttttattggaaaaatgcacaaaacatgtttttttgctgactcagatatcgtagctgaagaggacccagctccatgtgcgttctcagggaatggacgccagtgtactgccaatggcacggaatgtaggagtggctgggttggcccgaacggaggcatcaccaactttgataactttgcctttgccatgcttactgtgtttcagtgcatcaccatggagggctggacagacgtgctctactggatgaatgatgctatgggatttgaattgccctgggtgtattttgtcagtctcgtcatctttgggtcatttttcgtactaaatcttgtacttggtgtattgagcgggcacagtggctcacgcctataatcccagcactttcggaggccgaggcagctggaccacccgagatcaggagtttgagaccagcctgactaaggcagtgaaaccctgtctctactaaaaatacaaaaattagccaggcatggtggcgcatgcctgtaatcccagctacttgggaggctgaggcaggagaatcacttgaaccagggaggtggagattgcagtgagccaagactgcaccattgcattccagcctgggtgacaagagcaaaactccatctcaaaaaaaaaaaaaaaaaaaaaaaaaaaaaaaaaaaaagacttttctctcattcaacactttaccagcatctactgacagaaaatggacaattgaatttcctccaatatatatacctctgatatgtctgctttgtaaaagagtagtgtaattgcttacaacattgaaaaggttgttattggggtcctggggtagccaggatatcggcatgatttgtcaccatattcagaataaaactgtactgcaatagtgagttaattccatatcttggccaacagagaatttttggccagtggctactaaggcacacggaagtccagtctaaaagggacaggggaggactctttgtagatagttcttatgattaaaaaataacttcctatgtgttgtagtgatgattaagctgacagaatgctaaagacacccttaatgattacttgtagcaaagtacttccccacatttagctggatttgtctttggtttgaagaggctaatacgtgaaagatttgttcacagttggatgtccccttttctgaaccatgaagtaatattgtgaatggagttgaatgctgaggttagggtgccggaaagattcagggtccttcggtaccctcacatggcttggctttggtagaacaagaaactaagctctgatttggctttaaatgagagtgctaaatttcctttttctaataaagaacctagctaaacatttatatatacttttgaacactgaactttcttgttgcagagttaacagctgttgggggtagctgacagctggatcctggtgctgttggtaccatggtacctgaagtgcacaggctggtagccacacctgacattaacaagtgagtggtaacctctctgccgctggctcacagctactgtttccatagaaatggctgtcgggatcagtggaaacgaggtaagtgaaagttttcgctgatccttgtttccatcaagctgacgtctgtttccctggcaacagcagtggacagcagccaggcgctagcaacagattcagtagagctctcacttgtcagctgtggctatcatctgttcctgaccaagttcttttttttttttttaataatgtacagaaagacctctgaggacccaggaggcacctctggccacatgtgccctcctggatgctcgttttgcagatggagagctgtgtgctgagttgacttctctgtccgcagttccccctccacctgtgctcctgggttgttgatgtgcaggttaaaamagggaggstgttgaagggtattagtgttgccaggggaggctgttgaaatctggttgatcccaaatccctaggggaagagaaatcacttacagtggcttttcatgccagagacccagctcttt

SEQ ID NO: 43 - DNA, 1972 bp, Homo sapiens
gggcgagcgcctccgtccccggatgtgagctccggctgcccgcggtcccgagccagcggcgcgcgggcggcggcggcgggcaccgggcaccgcggcgggcgggcagacgggcgggcatggggggagcgccgagcggccccggcggccgggccggcatcaccgcggcgtctctccgctagaggaggggacaagccagttctcctttgcagcaaaaaattacatgtatatattattaagataatatatacattggattttatttttttaaaaagtttattttgctccatttttgaaaaagagagagcttgggtggcgagcggtttttttttwaaatcaattatccttattttctgttatttgtccccgtccctccccacccccctgctgaagcgagaataagggcagggaccgcggctcctacctcttggtgatccccttccccattccgcccccgcctcaacgcccagcacagtgccctgcacacagtagtcgctcaataaatgttcgtggatgatgatgatgatgatgatgaaaaaaatgcagcatcaacggcagcagcaagcggaccacgcgaacgaggcaaactatgcaagaggcaccagacttcctctttctggtgaaggaccaacttctcagccgaatagctccaagcaaactgtcctgtcttggcaagctgcaatcgatgctgctagacaggccaaggctgcccaaactatgagcacctctgcacccccacctgtaggatctctctcccaaagaaaacgtcagcaatacgccaagagcaaaaaacagggtaactcgtccaacagccgacctgcccgcgcccttttctgtttatcactcaataaccccatccgaagagcctgcattagtatagtggaatggaaaccatttgacatatttatattattggctatttttgccaattgtgtggccttagctatttacatcccattccctgaagatgattctaattcaacaaatcataacttggaaaaagtagaatatgccttcctgattatttttacagtcgagacatttttgaagattatagcgtatggattattgctacatcctaatgcttatgttaggaatggatggaatttactggattttgttatagtaatagtaggattgtttagtgtaattttggaacaattaaccaaagaaacagaaggcgggaaccactcaagcggcaaatctggaggctttgatgtcaaagccctccgtgcctttcgagtgttgcgaccacttcgactagtgtcaggrgtgcccagtttacaagttgtcctgaactccattataaaagccatggttcccctccttcacatagcccttttggtattatttgtaatcataatctatgctattataggattggaactttttattggaaaaatgcacaaaacatgtttttttgctgactcagatatcgtagctgaagaggacccagctccatgtgcgttctcagggaatggacgccagtgtactgccaatggcacggaatgtaggagtggctgggttggcccgaacggaggcatcaccaactttgataactttgcctttgccatgcttactgtgtttcagtgcatcaccatggagggctggacagacgtgctctactgggtaaatgatgcgataggatgggaatggccatgggtgtattttgttagtctgatcatccttggctcatttttcgtccttaacctggttcttggtgtccttagtgggtaagcagtcggatccgtgttgcaccttctcctgctgccacgtgtgaggcaactctgcgtgtctcctagctgctccctgacagcttctctgcatgtgtttggactctgatgtcctctcagtgtgttgcttttggattgaactgtgattctttctgcctgtatctgtctgtgagattccgtgtttccaatgcttgccaaacactgttaatttaatgaaaacgttcccccaaagccagttgtgt

SEQ ID NO: 44 - DNA, 7927 bp, Homo sapiens
gggcgagcgcctccgtccccggatgtgagctccggctgcccgcggtcccgagccagcggcgcgcgggcggcggcggcgggcaccgggcaccgcggcgggcgggcagacgggcgggcatggggggagcgccgagcggccccggcggccgggccggcatcaccgcggcgtctctccgctagaggaggggacaagccagttctcctttgcagcaaaaaattacatgtatatattattaagataatatatacattggattttatttttttaaaaagtttattttgctccatttttgaaaaagagagagcttgggtggcgagcggtttttttttwaaatcaattatccttattttctgttatttgtccccgtccctccccacccccctgctgaagcgagaataagggcagggaccgcggctcctacctcttggtgatccccttccccattccgcccccgcctcaacgcccagcacagtgccctgcacacagtagtcgctcaataaatgttcgtggatgatgatgatgatgatgatgaaaaaaatgcagcatcaacggcagcagcaagcggaccacgcgaacgaggcaaactatgcaagaggcaccagacttcctctttctggtgaaggaccaacttctcagccgaatagctccaagcaaactgtcctgtcttggcaagctgcaatcgatgctgctagacaggccaaggctgcccaaactatgagcacctctgcacccccacctgtaggatctctctcccaaagaaaacgtcagcaatacgccaagagcaaaaaacagggtaactcgtccaacagccgacctgcccgcgcccttttctgtttatcactcaataaccccatccgaagagcctgcattagtatagtggaatggaaaccatttgacatatttatattattggctatttttgccaattgtgtggccttagctatttacatcccattccctgaagatgattctaattcaacaaatcataacttggaaaaagtagaatatgccttcctgattatttttacagtcgagacatttttgaagattatagcgtatggattattgctacatcctaatgcttatgttaggaatggatggaatttactggattttgttatagtaatagtaggattgtttagtgtaattttggaacaattaaccaaagaaacagaaggcgggaaccactcaagcggcaaatctggaggctttgatgtcaaagccctccgtgcctttcgagtgttgcgaccacttcgactagtgtcaggrgtgcccagtttacaagttgtcctgaactccattataaaagccatggttcccctccttcacatagcccttttggtattatttgtaatcataatctatgctattataggattggaactttttattggaaaaatgcacaaaacatgtttttttgctgactcagatatcgtagctgaagaggacccagctccatgtgcgttctcagggaatggacgccagtgtactgccaatggcacggaatgtaggagtggctgggttggcccgaacggaggcatcaccaactttgataactttgcctttgccatgcttactgtgtttcagtgcatcaccatggagggctggacagacgtgctctactggatgaatgatgctatgggatttgaattgccctgggtgtattttgtcagtctcgtcatctttgggtcatttttcgtactaaatcttgtacttggtgtattgagcggagaattctcaaaggaaagagagaaggcaaaagcacggggagatttccagaagctccgggagaagcagcagctggaggaggatctaaagggctacttggattggatcacccaagctgaggacatcgatccggagaatgaggaagaaggaggagaggaaggcaaacgaaatactagcatgcccaccagcgagactgagtctgtgaacacagagaacgtcagcggtgaaggcgagaaccgaggctgctgtggaagtctctgtcaagccatctcaaaatccaaactcagccgacgctggcgtcgctggaaccgattcaatcgcagaagatgtagggccgccgtgaagtctgtcacgttttactggctggttatcgtcctggtgtttctgaacaccttaaccatttcctctgagcactacaatcagccagattggttgacacagattcaagatattgccaacaaagtcctcttggctctgttcacctgcgagatgctggtaaaaatgtacagcttgggcctccaagcatatttcgtctctcttttcaaccggtttgattgcttcgtggtgtgtggtggaatcactgagacgatcttggtggaactggaaatcatgtctcccctggggatctctgtgtttcggtgtgtgcgcctcttaagaatcttcaaagtgaccaggcactggacttccctgagcaacttagtggcatccttattaaactccatgaagtccatcgcttcgctgttgcttctgctttttctcttcattatcatcttttccttgcttgggatgcagctgtttggcggcaagtttaattttgatgaaacgcaaaccaagcggagcacctttgacaatttccctcaagcacttctcacagtgttccagatcctgacaggcgaagactggaatgctgtgatgtacgatggcatcatggcttacgggggcccatcctcttcaggaatgatcgtctgcatctacttcatcatcctcttcatttgtggtaactatattctactgaatgtcttcttggccatcgctgtagacaatttggctgatgctgaaagtctgaacactgctcagaaagaagaagcggaagaaaaggagaggaaaaagattgccagaaaagagagcctagaaaataaaaagaacaacaaaccagaagtcaaccagatagccaacagtgacaacaaggttacaattgatgactatagagaagaggatgaagacaaggacccctatccgccttgcgatgtgccagtaggggaagaggaagaggaagaggaggaggatgaacctgaggttcctgccggaccccgtcctcgaaggatctcggagttgaacatgaaggaaaaaattgcccccatccctgaagggagcgctttcttcattcttagcaagaccaacccgatccgcgtaggctgccacaagctcatcaaccaccacatcttcaccaacctcatccttgtcttcatcatgctgagcagcgctgccctggccgcagaggaccccatccgcagccactccttccggaacacgatactgggttactttgactatgccttcacagccatctttactgttgagatcctgttgaagatgacaacttttggagctttcctccacaaaggggccttctgcaggaactacttcaatttgctggatatgctggtggttggggtgtctctggtgtcatttgggattcaatccagtgccatctccgttgtgaagattctgagggtcttaagggtcctgcgtcccctcagggccatcaacagagcaaaaggacttaagcacgtggtccagtgcgtcttcgtggccatccggaccatcggcaacatcatgatcgtcacyaccctcctgcagttcatgtttgcctgtatcggggtccagttgttcaaggggaagttctatcgctgtacggatgaagccaaaagtaaccctgaagaatgcaggggacttttcatcctctacaaggatggggatgttgacagtcctgtggtccgtgaacggatctggcaaaacagtgatttcaacttcgacaacgtcctctctgctatgatggcgctcttcacagtctccacgtttgagggctggcctgcgttgctgtataaagccatcgactcgaatggagagaacatcggcccaatctacaaccaccgcgtggagatctccatcttcttcatcatctacatcatcattgtagctttcttcatgatgaacatctttgtgggctttgtcatcgttacatttcaggaacaaggagaaaaagagtataagaactgtgagctggacaaaaatcagcgtcagtgtgttgaatacgccttgaaagcacgtcccttgcggagatacatccccaaaaacccctaccagtacaagttctggtacgtggtgaactcttcgcctttcgaatacatgatgtttgtcctcatcatgctcaacacactctgcttggccatgcagcactacgagcagtccaagatgttcaatgatgccatggacattctgaacatggtcttcaccggggtgttcaccgtcgagatggttttgaaagtcatcgcatttaagcctaaggggtattttagtgacgcctggaacacgtttgactccctcatcgtaatcggcagcattatagacgtggccctcagcgaagcrgacccaactgaaagtgaaaatgtccctgtcccaactgctacacctgggaactctgaagagagcaatagaatctccatcacctttttccgtcttttccgagtgatgcgattggtgaagcttctcagcaggggggaaggcatccggacattgctgtggacttttattaagtcctttcaggcgctcccgtatgtggccctcctcatagccatgctgttcttcatctatgcggtcattggcatgcagatgtttgggaaagttgccatgagagataacaaccagatcaataggaacaataacttccagacgtttccccaggcggtgctgctgctcttcaggtgtgcaacaggtgaggcctggcaggagatcatgctggcctgtctcccagggaagctctgtgaccctgagtcagattacaaccccggggaggagtatacatgtgggagcaactttgccattgtctatttcatcagtttttacatgctctgtgcatttctgatcatcaatctgtttgtggctgtcatcatggataatttcgactatctgacccgggactggtctattttggggcctcaccatttagatgaattcaaaagaatatggtcagaatatgaccctgaggcaaagggaaggataaaacaccttgatgtggtcactctgcttcgacgcatccagcctcccctggggtttgggaagttatgtccacacagggtagcgtgcaagagattagttgccatgaacatgcctctcaacagtgacgggacagtcatgtttaatgcaaccctgtttgctttggttcgaacggctcttaagatcaagaccgaagggaacctggagcaagctaatgaagaacttcgggctgtgataaagaaaatttggaagaaaaccagcatgaaattacttgaccaagttgtccctccagctggtgatgatgaggtaaccgtggggaagttctatgccactttcctgatacaggactactttaggaaattcaagaaacggaaagaacaaggactggtgggaaagtaccctgcgaagaacaccacaattgccctacaggcgggattaaggacactgcatgacattgggccagaaatccggcgtgctatatcgtgtgatttgcaagatgacgagcctgaggaaacaaaacgagaagaagaagatgatgtgttcaaaagaaatggtgccctgcttggaaaccatgtcaatcatgttaatagtgataggagagattcccttcagcagaccaataccacccaccgtcccctgcatgtccaaaggccttcaattccacctgcaagtgatactgagaaaccgctgtttcctccagcaggaaattcggtgtgtcataaccatcataaccataattccataggaaagcaagttcccacctcaacaaatgccaatctcaataatgccaatatgtccaaagctgcccatggaaagcggcccagcattgggaaccttgagcatgtgtctgaaaatgggcatcattcttcccacaagcatgaccgggagcctcagagaaggtccagtgtgaaaaggtccgactcaggagatgaacagctcccaactatttgccgggaagacccagagatacatggctatttcagggacccccactgcttgggggagcaggagtatttcagtagtgaggaatgctacgaggatgacagctcgcccacctggagcaggcaaaactatggctactacagcagatacccaggcagaaacatcgactctgagaggccccgaggctaccatcatccccaaggattcttggaggacgatgactcgcccgtttgctatgattcacggagatctccaaggagacgcctactacctcccaccccagcatcccaccggagatcctccttcaactttgagtgcctgcgccggcagagcagccaggaagaggtcccgtcgtctcccatcttcccccatcgcacggccctgcctctgcatctaatgcagcaacagatcatggcagttgccggcctagattcaagtaaagcccagaagtactcaccgagtcactcgacccggtcgtgggccacccctccagcaacccctccctaccgggactggacaccgtgctacacccccctgatccaagtggagcagtcagaggccctggaccaggtgaacggcagcctgccgtccctgcaccgcagctcctggtacacagacgagcccgacatctcctaccggactttcacaccagccagcctgactgtccccagcagcttccggaacaaaaacagcgacaagcagaggagtgcggacagcttggtggaggcagtcctgatatccgaaggcttgggacgctatgcaagggacccaaaatttgtgtcagcaacaaaacacgaaatcgctgatgcctgtgacctcaccatcgacgagatggagagtgcagccagcaccctgcttaatgggaacgtgcgtccccgagccaacggggatgtgggccccctctcacaccggcaggactatgagctacaggactttggtcctggctacagcgacgaagagccagaccctgggagggatgaggaggacctggcggatgaaatgatatgcatcaccaccttgtagcccccagcgaggggcagactggctctggcctcaggtggggcgcaggagagccaggggaaaagtgcctcatagttaggaaagtttaggcactagttgggagtaatattcaattaattagacttttgtataagagatgtcatgcctcaagaaagccataaacctggtaggaacaggtcccaagcggttgagcctggcagagtaccatgcgctcggccccagctgcaggaaacagcaggccccgccctctcacagaggatgggtgaggaggccagacctgccctgccccattgtccagatgggcactgctgtggagtctgcttctcccatgtaccagggcaccaggcccacccaactgaaggcatggcggcggggtgcaggggaaagttaaaggtgatgacgatcatcacacctgtgtcgttacctcagccatcggtctagcatatcagtcactgggcccaacatatccatttttaaaccctttcccccaaatacaataaggttttctgtgatgtgacgccagtttacataagagaatatcactccgatggtcggtttctgactgtcacgctaagggcaactgtaaactggaataataatgcactcgcaaccaggtaaacttagatacactagtttgtttaaaattatagatttactgtacatgacttgtaatatactataatttgtatttgtaaagagatggtctatattttgtaattactgtattgtatttgaactgcagcaatatccatgggtcctaataattgtagttccccactaaaatctagaaattattagtatttttactcgggctatccagaagtagaagaaatagagccaattctcatttattcagcgaaaatcctctggggttaaaattttaagtttgaaagaacttgacactacagaaatttttctaaaatattttgagtcactataaacctatcatctttccacaaga

SEQ ID NO: 45 - protein, 141 aa, Homo sapiens
MRGLSPDRRLPEPAPCPAAGSPEPRSAGRRQRHVLALPEEEAWRPQQCALLEADASDEVGMLPASPRAASGFDNFFQVQEGEGQGWEGAMALEAGSSPFLPVSPEVMKRRRGGLIEQRDIIKAHEAHKMQSTPQARRKEWE

SEQ ID NO: 46 - protein, 647 aa, Homo sapiens
MARFGEAVVARPGSGDGDSDQSRNRQGTPVPASGQAAAYKQTKAQRARTMALYNPIPVRQNCFTVNRSLFIFGEDNIVRKYAKKLIDWPPFEYMILATIIANCIVLALEQHLPEDDKTPMSRRLEKTEPYFIGIFCFEAGIKIVALGFIFHKGSYLRNGWNVMDFIVVLSGILATAGTHFNTHVDLRTLRAVRVLRPLKLVSGIPSLQIVLKSIMKAMVPLLQIGLLLFFAILMFAIIGLEFYSGKLHRACFMNNSGILEGFDPPHPCGVQGCPAGYECKDWIGPNDGITQFDNILFAVLTVFQCITMEGWTTVLYNTNDALGATWNWLYFIPLIIIGSFFVLNLVLGVLSGEFAKERERVENRRAFMKLRRQQQIERELNGYRAWIDKAEEVMLAEENKNAGTSALEVLRRATIKRSRTEAMTRDSSDEHCVDISSVGTPLARASIKSAKVDGVSYFRHKERLLRISIRHMVKSQVFYWIVLSLVALNTACVAIVHHNQPQWLTHLLYYAEFLFLGLFLLEMSLKMYGMGPRLYFHSSFNCFDFGVTVGSIFEVVWAIFRPGTSFGISVLRALRLLRIFKITKYWASLRNLVVSLMSSMKSIISLLFLLFLFIVVFALLGMQLFGGRFNFNDGTPSANFDTFPAAI

SEQ ID NO: 47 - protein, 99 aa, Homo sapiens
TVFQILTGEDWNEVMYNGIRSQGGVSSGMWSAIYFIVLTLFGNYTLLNVFLAIAVDNLANAQELTKDEQEEEEAFNQKHALQKAKEVSPMSAPNMPSIE

SEQ ID NO: 48 - protein, 69 aa, Homo sapiens
RERRRRHHMSVWEQRTSQLRKHMQMSSQEALNREEAPTMNPLNPLNPLSSLNPLNAHPSLYRRPRAIEG

SEQ ID NO: 49 - protein, 917 aa, Homo sapiens
GLALEKFEEERISRGGSLKGDGGDRSSALDNQRTPLSLGQREPPWLARPCHGNCDPTQQEAGGGEAVVTFEDRARHRQSQRRSRHRRVRTEGKESSSASRSRSASQERSLDEAMPTEGEKDHELRGNHGAKEPTIQEERAQDLRRTNSLMVSRGSGLAGGLDEADTPLVLPHPELEVGKHVVLTEQEPEGSSEQALLGNVQLDMGRVISQSEPDLSCITANTDKATTESTSVTVAIPDVDPLVDSTVVHISNKTDGEASPLKEAEIREDEEEVEKKKQKKEKRETGKAMVPHSSMFIFSTTNPIRRACHYIVNLRYFEMCILLVIAASSIALAAEDPVLTNSERNKVLRYFDYVFTGVFTFEMVIKMIDQGLILQDGSYFRDLWNILDFVVVVGALVAFALANALGTNKGRDIKTIKSLRVLRVLRPLKTIKRLPKLKAVFDCVVTSLKNVFNILIVYKLFMFIFAVIAVQLFKGKFFYCTDSSKDTEKECIGNYVDHEKNKMEVKGREWKRHEFHYDNIIWALLTLFTVSTGEGWPQVLQHSVDVTEEDRGPSRSNRMEMSIFYVVYFVVFPFFFVNIFVALIIITFQEQGDKMMEECSLEKNERACIDFAISAKPLTRYMPQNRHTFQYRVWHFVVSPSFEYTIMAMIALNTVVLMMKYYSAPCTYELALKYLNIAFTMVFSLECVLKVIAFGFLNYFRDTWNIFDFITVIGSITEIILTDSKLVNTSGFNMSFLKLFRAARLIKLLRQGYTIRILLWTFVQSFKALPYVCLLIAMLFFIYAIIGMQVFGNIKLDEESHINRHNNFRSFFGSLMLLFRSATGEAWQEIMLSCLGEKGCEPDTTAPSGQNENERCGTDLAYVYFVSFIFFCSFLMLNLFVAVIMDNFEYLTRDSSILGPHHLDEFVRVWAEYDRAA

SEQ ID NO: 50 - protein, 42 aa, Homo sapiens
WCVGPSAAPAGPRAKVSGVPREEAGIGATQMPACYRRKGDSS

SEQ ID NO: 51 - protein, 141 aa, Homo sapiens; identical to SEQ ID NO: 45

SEQ ID NO: 52 - protein, 42 aa, Homo sapiens; identical to SEQ ID NO: 50

SEQ ID NO: 53 - protein, 1754 aa, Homo sapiens
MARFGEAVVARPGSGDGDSDQSRNRQGTPVPASGQAAAYKQTKAQRARTMALYNPIPVRQNCFTVNRSLFIFGEDNIVRKYAKKLIDWPPFEYMILATIIANCIVLALEQHLPEDDKTPMSRRLEKTEPYFIGIFCFEAGIKIVALGFIFHKGSYLRNGWNVMDFIVVLSGILATAGTHFNTHVDLRTLRAVRVLRPLKLVSGIPSLQIVLKSIMKAMVPLLQIGLLLFFAILMFAIIGLEFYSGKLHRACFMNNSGILEGFDPPHPCGVQGCPAGYECKDWIGPNDGITQFDNILFAVLTVFQCITMEGWTTVLYNTNDALGATWNWLYFIPLIIIGSFFVLNLVLGVLSGEFAKERERVENRRAFMKLRRQQQIERELNGYRAWIDKAEEVMLAEENKNAGTSALEVLRRATIKRSRTEAMTRDSSDEHCVDISSVGTPLARASIKSAKVDGVSYFRHKERLLRISIRHMVKSQVFYWIVLSLVALNTACVAIVHHNQPQWLTHLLYYAEFLFLGLFLLEMSLKMYGMGPRLYFHSSFNCFDFGVTVGSIFEVVWAIFRPGTSFGISVLRALRLLRIFKITKYWASLRNLVVSLMSSMKSIISLLFLLFLFIVVFALLGMQLFGGRFNFNDGTPSANFDTFPAAIITVFQILTGEDWNEVMYNGIRSQGGVSSGMWSAIYFIVLTLFGNYTLLNVFLAIAVDNLANAQELTKDEQEEEEAFNQKHALQKAKEVSPMSAPNMPSIERDRRRRHHMSMWEPRSSHLRERRRRHHMSVWEQRTSQLRKHMQMSSQEALNREEAPTMNPLNPLNPLSSLNPLNAHPSLYRRPRAIEGWPGLALEKFEEERISRGGSLKGDGGDRSSALDNQRTPLSLGQREPPWLARPCHGNCDPTQQEAGGGEAVVTFEDRARHRQSQRRSRHRRVRTEGKESSSASRSRSASQERSLDEAMPTEGEKDHELRGNHGAKEPTIQEERAQDLRRTNSLMVSRGSGLAGGLDEADTPLVLPHPELEVGKHVVLTEQEPEGSSEQALLGNVQLDMGRVISQSEPDLSCITANTDKATTESTSVTVAIPDVDPLVDSTVVHISNKTDGEASPLKEAEIREDEEEVEKKKQKKEKRETGKAMVPHSSMFIFSTTNPIRRACHYIVNLRYFEMCILLVIAASSIALAAEDPVLTNSERNKVLRYFDYVFTGVFTFEMVIKMIDQGLILQDGSYFRDLWNILDFVVVVGALVAFALANALGTNKGRDIKTIKSLRVLRVLRPLKTIKRLPKLKAVFDCVVTSLKNVFNILIVYKLFMFIFAVIAVQLFKGKFFYCTDSSKDTEKECIGNYVDHEKNKMEVKGREWKRHEFHYDNIIWALLTLFTVSTGEGWPQVLQHSVDVTEEDRGPSRSNRMEMSIFYVVYFVVFPFFFVNIFVALIIITFQEQGDKMMEECSLEKNERACIDFAISAKPLTRYMPQNRHTFQYRVWHFVVSPSFEYTIMAMIALNTVVLMMKYYSAPCTYELALKYLNIAFTMVFSLECVLKVIAFGFLNYFRDTWNIFDFITVIGSITEIILTDSKLVNTSGFNMSFLKLFRAARLIKLLRQGYTIRILLWTFVQSFKALPYVCLLIAMLFFIYAIIGMQVFGNIKLDEESHINRHNNFRSFFGSLMLLFRSATGEAWQEIMLSCLGEKGCEPDTTAPSGQNENERCGTDLAYVYFVSFIFFCSFLMLNLFVAVIMDNFEYLTRDSSILGPHHLDEFVRVWAEYDRAA

SEQ ID NO: 54 - protein, 23 aa, Homo sapiens
MSSWPTRPTKSTAPPRPGGKNGT

SEQ ID NO: 55 - protein, 1737 aa, Homo sapiens
TIIANCIVLALEQHLPDDDKTPMSERLDDTEPYFIGIFCFEAGIKIIALGFAFHKGSYLRNGWNVMDFVVVLTGILATVGTEFDLRTLRAVRVLRPLKLVSGIPSLQVVLKSIMKAMIPLLQIGLLLFFAILIFAIIGLEFYMGKFHTTCFEEGTDDIQGESPAPCGTEEPARTCPNGTKCQPYWEGPNNGITQFDNILFAVLTVFQCITMEGWTDLLYNSNDASGNTWNWLYFIPLIIIGSFFMLNLVLGVLSGEFAKERERVENRRAFLKLRRQQQIERELNGYMEWISKAEEVILAEDETDGEQRHPFDGALRRTTIKKSKTDLLNPEEAEDQLADIASVGSPFARASIKSAKLENSTFFHKKERRMRFYIRRMVKTQAFYWTVLSLVALNTLCVAIVHYNQPEWLSDFLYYAEFIFLGLFMSEMFIKMYGLGTRPYFHSSFNCFDCGVIIGSIFEVIWAVIKPGTSFGISVLRALRLLRIFKVTKYWASLRNLVVSLLNSMKSIISLLFLLFLFIVVFALLGMQLFGGQFNFDEGTPPTNFDTFPAAIMTVFQILTGEDWNEVMYDGIKSQGGVQGGMVFSIYFIVLTLFGNYTLLNVFLAIAVDNLANAQELTKDEQEEEEAANQKLALQKAKEVAEVSPLSAANMSIAVKEQQKNQKPAKSVWEQRTSEMRKQNLLASREALYNEMDPDERWKAAYTRHLRPDMKTHLDRPLVVDPQENRNNNTNKSRAAEPTVDQRLGQQRAEDFLRKQARYHDRARDPSGSAGLDARRPWAGSQEAELSREGPYGRESDHHAREGSLEQPGFWEGEAERGKAGDPHRRHVHRQGGSRESRSGSPRTGADGEHRRHRAHRRPGEEGPEDKAERRARHREGSRPARGGEGEGEGPDGGERRRRHRHGAPATYEGDARREDKERRHRRRKENQGSGVPVSGPNLSTTRPIQQDLGRQDPPLAEDIDNMKNNKLATAESAAPHGSLGHAGLPQSPAKMGNSTDPGPMLAIPAMATNPQNAASRRTPNNPGNPSNPGPPKTPENSLIVTNPSGTQTNSAKTARKPDHTTVDIPPACPPPLNHTVVQVNKNANPDPLPKKEEEKKEEEEDDRGEDGPKPMPPYSSMFILSTTNPLRRLCHYILNLRYFEMCILMVIAMSSIALAAEDPVQPNAPRNNVLRYFDYVFTGVFTFEMVIKMIDLGLVLHQGAYFRDLWNILDFIVVSGALVAFAFTGNSKGKDINTIKSLRVLRVLRPLKTIKRLPKLKAVFDCVVNSLKNVFNILIVYMLFMFIFAVVAVQLFKGKFFHCTDESKEFEKDCRGKYLLYEKNEVKARDREWKKYEFHYDNVLWALLTLFTVSTGEGWPQVLKHSVDATFENQGPSPGYRMEMSIFYVVYFVVFPFFFVNIFVALIIITFQEQGDKMMEEYSLEKNERACIDFAISAKPLTRHMPQNKQSFQYRMWQFVVSPPFEYTIMAMIALNTIVLMMKFYGASVAYENALRVFNIVFTSLFSLECVLKVMAFGILNYFRDAWNIFDFVTVLGSITDILVTEFGNNFINLSFLRLFRAARLIKLLRQGYTIRILLWTFVQSFKALPYVCLLIAMLFFIYAIIGMQVFGNIGIDVEDEDSDEDEFQITEHNNFRTFFQALMLLFRSATGEAWHNIMLSCLSGKPCDKNSGILTRECGNEFAYFYFVSFIFLCSFLMLNLFVAVIMDNFEYLTRDSSILGPHHLDEYVRVWAEYDPAA

SEQ ID NO: 56 - protein, 32 aa, Homo sapiens
CGRIHYKDMYSLLRVISPPLGLGKKCPHRVAC

SEQ ID NO: 57 - protein, 437 aa, Homo sapiens
KRLLRMDLPVADDNTVHFNSTLMALIRTALDIKIAKGGADKQQMDAELRKEMMAIWPNLSQKTLDLLVTPHKSTDLTVGKIYAAMMIMEYYRQSKAKKLQAMREEQDRTPLMFQRMEPPSPTQEGGPGQNALPSTQLDPGGALMAHESGLKESPSWVTQRAQEMFQKTGTWSPEQGPPTDMPNSQPNSQSVEMREMGRDGYSDSEHYLPMEGQGRAASMPRLPAENQRRRGRPRGNNLSTISDTSPMKRSASVLGPKARRLDDYSLERVPPEENQRHHQRRRDRSHRASERSLGRYTDVDTGLGTDLSMTTQSGDLPSKERDQERGRPKDRKHRQHHHHHHHHHHPPPPDKDRYAQERPDHGRARARDQRWSRSPSEGREHMAHRQGSSSVSGSPAPSTSGTSTPRRGRRQLPQTPSTPRPHVSYSPVIRKAGGSGP

SEQ ID NO: 58 - protein, 292 aa, Homo sapiens
RSSSSSSSSSSSRRWPGRAGRPPAALGGTQAPRPSLWPEIGRPRGATAAAARPGWRGGSQARPGASPPGPVDTAGPGGRHLARTCPRGPRVPGTMATTGAPTTTRPMARAAGAARRPWPGPTTRHPPYDTRPRAPPGARPGLPGPRARPAPRLLGTAGDSPTATTRRTDWPGPAGRAPGRACTNPTARVTMIGAKPGRGGARPAPHAPHAHTPPEEPRRGRGGPAQRARERASRETPDSGEARAGPQGCPAETLGQKRPSWAATAPPNQPRSPHPRQGLSGGRQGADKPHSQ

SEQ ID NO: 59 - protein, 23 aa, Homo sapiens
MSSWPTRPTKSTAPPRPGGKNGT

SEQ ID NO: 60 - protein, 294 aa, Homo sapiens
RSSSSSSSSSSSRRWPGRAGRPPAALGGTQAPRPSLWPEIGRPRGATAAAARPGWRGGSQARPGASPPGPVDTAGPGGRHLARTCPRGPRVPGTMATTGAPTTTRPMARAAGAARRPWPGPTTRHPPYDTRPRAPPGARPGLPGPRARPAPRLLGTAGDSPTATTRRTDWPGPAGRAPGRACTNPTARVTMIGAKPGRGGARPAPHAPHAHTPPEEPRRGRGGPAQRARERASRETPDSGEARAGPQGCPAETLGQKRPSWAATAPPNQPRSPHPRQGLSGGRQGADKPHSQGI

SEQ ID NO: 61 - protein, 32 aa, Homo sapiens; identical to SEQ ID NO: 56

SEQ ID NO: 62 - protein, 2205 aa, Homo sapiens
TIIANCIVLALEQHLPDDDKTPMSERLDDTEPYFIGIFCFEAGIKIIALGFAFHKGSYLRNGWNVMDFVVVLTGILATVGTEFDLRTLRAVRVLRPLKLVSGIPSLQVVLKSIMKAMIPLLQIGLLLFFAILIFAIIGLEFYMGKFHTTCFEEGTDDIQGESPAPCGTEEPARTCPNGTKCQPYWEGPNNGITQFDNILFAVLTVFQCITMEGWTDLLYNSNDASGNTWNWLYFIPLIIIGSFFMLNLVLGVLSGEFAKERERVENRRAFLKLRRQQQIERELNGYMEWISKAEEVILAEDETDGEQRHPFDGALRRTTIKKSKTDLLNPEEAEDQLADIASVGSPFARASIKSAKLENSTFFHKKERRMRFYIRRMVKTQAFYWTVLSLVALNTLCVAIVHYNQPEWLSDFLYYAEFIFLGLFMSEMFIKMYGLGTRPYFHSSFNCFDCGVIIGSIFEVIWAVIKPGTSFGISVLRALRLLRIFKVTKYWASLRNLVVSLLNSMKSIISLLFLLFLFIVVFALLGMQLFGGQFNFDEGTPPTNFDTFPAAIMTVFQILTGEDWNEVMYDGIKSQGGVQGGMVFSIYFIVLTLFGNYTLLNVFLAIAVDNLANAQELTKDEQEEEEAANQKLALQKAKEVAEVSPLSAANMSIAVKEQQKNQKPAKSVWEQRTSEMRKQNLLASREALYNEMDPDERWKAAYTRHLRPDMKTHLDRPLVVDPQENRNNNTNKSRAAEPTVDQRLGQQRAEDFLRKQARYHDRARDPSGSAGLDARRPWAGSQEAELSREGPYGRESDHHAREGSLEQPGFWEGEAERGKAGDPHRRHVHRQGGSRESRSGSPRTGADGEHRRHRAHRRPGEEGPEDKAERRARHREGSRPARGGEGEGEGPDGGERRRRHRHGAPATYEGDARREDKERRHRRRKENQGSGVPVSGPNLSTTRPIQQDLGRQDPPLAEDIDNMKNNKLATAESAAPHGSLGHAGLPQSPAKMGNSTDPGPMLAIPAMATNPQNAASRRTPNNPGNPSNPGPPKTPENSLIVTNPSGTQTNSAKTARKPDHTTVDIPPACPPPLNHTVVQVNKNANPDPLPKKEEEKKEEEEDDRGEDGPKPMPPYSSMFILSTTNPLRRLCHYILNLRYFEMCILMVIAMSSIALAAEDPVQPNAPRNNVLRYFDYVFTGVFTFEMVIKMIDLGLVLHQGAYFRDLWNILDFIVVSGALVAFAFTGNSKGKDINTIKSLRVLRVLRPLKTIKRLPKLKAVFDCVVNSLKNVFNILIVYMLFMFIFAVVAVQLFKGKFFHCTDESKEFEKDCRGKYLLYEKNEVKARDREWKKYEFHYDNVLWALLTLFTVSTGEGWPQVLKHSVDATFENQGPSPGYRMEMSIFYVVYFVVFPFFFVNIFVALIIITFQEQGDKMMEEYSLEKNERACIDFAISAKPLTRHMPQNKQSFQYRMWQFVVSPPFEYTIMAMIALNTIVLMMKFYGASVAYENALRVFNIVFTSLFSLECVLKVMAFGILNYFRDAWNIFDFVTVLGSITDILVTEFGNNFINLSFLRLFRAARLIKLLRQGYTIRILLWTFVQSFKALPYVCLLIAMLFFIYAIIGMQVFGNIGIDVEDEDSDEDEFQITEHNNFRTFFQALMLLFRSATGEAWHNIMLSCLSGKPCDKNSGILTRECGNEFAYFYFVSFIFLCSFLMLNLFVAVIMDNFEYLTRDSSILGPHHLDEYVRVWAEYDPAAWGRMPYLDMYQMLRHMSPPLGLGKKCPARVAKRLLRMDLPVADDNTVHFNSTLMALIRTALDIKIAKGGADKQQMDAELRKEMMAIWPNLSQKTLDLLVTPHKSTDLTVGKIYAAMMIMEYYRQSKAKKLQAMREEQDRTPLMFQRMEPPSPTQEGGPGQNALPSTQLDPGGALMAHESGLKESPSWVTQRAQEMFQKTGTWSPEQGPPTDMPNSQPNSQSVEMREMGRDGYSDSEHYLPMEGQGRAASMPRLPAENQRRRGRPRGNNLSTISDTSPMKRSASVLGPKARRLDDYSLERVPPEENQRHHQRRRDRSHRASERSLGRYTDVDTGLGTDLSMTTQSGDLPSKERDQERGRPKDRKHRQHHHHHHHHHHPPPPDKDRYAQERPDHGRARARDQRWSRSPSEGREHMAHRQGSSSVSGSPAPSTSGTSTPRRGRRQLPQTPSTPRPHVSYSPVIRKAGGSGP

SEQ ID NO: 63 - protein, 23 aa, Homo sapiens
MSSWPTRPTKSTAPPRPGGKNGT

SEQ ID NO: 64 - protein, 1545 aa, Homo sapiens
TIIANCIVLALEQHLPDDDKTPMSERLDDTEPYFIGIFCFEAGIKIIALGFAFHKGSYLRNGWNVMDFVVVLTGILATVGTEFDLRTLRAVRVLRPLKLVSGIPSLQVVLKSIMKAMIPLLQIGLLLFFAILIFAIIGLEFYMGKFHTTCFEEGTDDIQGESPAPCGTEEPARTCPNGTKCQPYWEGPNNGITQFDNILFAVLTVFQCITMEGWTDLLYNSNDASGNTWNWLYFIPLIIIGSFFMLNLVLGVLSGEFAKERERVENRRAFLKLRRQQQIERELNGYMEWISKAEEVILAEDETDGEQRHPFDGALRRTTIKKSKTDLLNPEEAEDQLADIASVGSPFARASIKSAKLENSTFFHKKERRMRFYIRRMVKTQAFYWTVLSLVALNTLCVAIVHYNQPEWLSDFLYYAEFIFLGLFMSEMFIKMYGLGTRPYFHSSFNCFDCGVIIGSIFEVIWAVIKPGTSFGISVLRALRLLRIFKVTKYWASLRNLVVSLLNSMKSIISLLFLLFLFIVVFALLGMQLFGGQFNFDEGTPPTNFDTFPAAIMTVFQILTGEDWNEVMYDGIKSQGGVQGGMVFSIYFIVLTLFGNYTLLNVFLAIAVDNLANAQELTKDEQEEEEAANQKLALQKAKEVAEVSPLSAANMSIAVKEQQKNQKPAKSVWEQRTSEMRKQNLLASREALYNEMDPDERWKAAYTRHLRPDMKTHLDRPLVVDPQENRNNNTNKSRAAEPTVDQRLGQQRAEDFLRKQARYHDRARDPSGSAGLDARRPWAGSQEAELSREGPYGRESDHHAREGSLEQPGFWEGEAERGKAGDPHRRHVHRQGGSRESRSGSPRTGADGEHRRHRAHRRPGEEGPEDKAERRARHREGSRPARGGEGEGEGPDGGERRRRHRHGAPATYEGDARREDKERRHRRRKENQGSGVPVSGPNLSTTRPIQQDLGRQDPPLAEDIDNMKNNKLATAESAAPHGSLGHAGLPQSPAKMGNSTDPGPMLAIPAMATNPQNAASRRTPNNPGNPSNPGPPKTPENSLIVTNPSGTQTNSAKTARKPDHTTVDIPPACPPPLNHTVVQVNKNANPDPLPKKEEEKKEEEEDDRGEDGPKPMPPYSSMFILSTTNPLRRLCHYILNLRYFEMCILMVIAMSSIALAAEDPVQPNAPRNNVLRYFDYVFTGVFTFEMVIKMIDLGLVLHQGAYFRDLWNILDFIVVSGALVAFAFTGNSKGKDINTIKSLRVLRVLRPLKTIKRLPKLKAVFDCVVNSLKNVFNILIVYMLFMFIFAVVAVQLFKGKFFHCTDESKEFEKDCRGKYLLYEKNEVKARDREWKKYEFHYDNVLWALLTLFTVSTGEGWPQVLKHSVDATFENQGPSPGYRMEMSIFYVVYFVVFPFFFVNIFVALIIITFQEQGDKMMEEYSLEKNERACIDFAISAKPLTRHMPQNKQSFQYRMWQFVVSPPFEYTIMAMIALNTIVLMMKFYGASVAYENALRVFNIVFTSLFSLECVLKVMAFGILNYFRDAWNIFDFVTVLGSITDILVTEFG

SEQ ID NO: 65 - protein, 23 aa, Homo sapiens
MSSWPTRPTKSTAPPRPGGKNGT

SEQ ID NO: 66 - protein, 12 aa, Homo sapiens
AWSRATPPSPRS

SEQ ID NO: 67 - protein, 1545 aa, Homo sapiens; identical to SEQ ID NO: 64

SEQ ID NO: 68 - protein, 1843 aa, Homo sapiens
MARFGDEMPARYGGGGSGAAAGVVVGSGGGRGAGGSRQGGQPGAQRMYKQSMAQRARTMALYNPIPVRQNCLTVNRSLFLFSEDNVVRKYAKKITEWPPFEYMILATIIANCIVLALEQHLPDDDKTPMSERLDDTEPYFIGIFCFEAGIKIIALGFAFHKGSYLRNGWNVMDFVVVLTGILATVGTEFDLRTLRAVRVLRPLKLVSGIPSLQVVLKSIMKAMIPLLQIGLLLFFAILIFAIIGLEFYMGKFHTTCFEEGTDDIQGESPAPCGTEEPARTCPNGTKCQPYWEGPNNGITQFDNILFAVLTVFQCITMEGWTDLLYNSNDASGNTWNWLYFIPLIIIGSFFMLNLVLGVLSGEFAKERERVENRRAFLKLRRQQQIERELNGYMEWISKAEEVILAEDETDGEQRHPFDGALRRTTIKKSKTDLLNPEEAEDQLADIASVGSPFARASIKSAKLENSTFFHKKERRMRFYIRRMVKTQAFYWTVLSLVALNTLCVAIVHYNQPEWLSDFLYYAEFIFLGLFMSEMFIKMYGLGTRPYFHSSFNCFDCGVIIGSIFEVIWAVIKPGTSFGISVLRALRLLRIFKVTKYWASLRNLVVSLLNSMKSIISLLFLLFLFIVVFALLGMQLFGGQFNFDEGTPPTNFDTFPAAIMTVFQILTGEDWNEVMYDGIKSQGGVQGGMVFSIYFIVLTLFGNYTLLNVFLAIAVDNLANAQELTKDEQEEEEAANQKLALQKAKEVAEVSPLSAANMSIAVKEQQKNQKPAKSVWEQRTSEMRKQNLLASREALYNEMDPDERWKAAYTRHLRPDMKTHLDRPLVVDPQENRNNNTNKSRAAEPTVDQRLGQQRAEDFLRKQARYHDRARDPSGSAGLDARRPWAGSQEAELSREGPYGRESDHHAREGSLEQPGFWEGEAERGKAGDPHRRHVHRQGGSRESRSGSPRTGADGEHRRHRAHRRPGEEGPEDKAERRARHREGSRPARGGEGEGEGPDGGERRRRHRHGAPATYEGDARREDKERRHRRRKENQGSGVPVSGPNLSTTRPIQQDLGRQDPPLAEDIDNMKNNKLATAESAAPHGSLGHAGLPQSPAKMGNSTDPGPMLAIPAMATNPQNAASRRTPNNPGNPSNPGPPKTPENSLIVTNPSGTQTNSAKTARKPDHTTVDIPPACPPPLNHTVVQVNKNANPDPLPKKEEEKKEEEEDDRGEDGPKPMPPYSSMFILSTTNPLRRLCHYILNLRYFEMCILMVIAMSSIALAAEDPVQPNAPRNNVLRYFDYVFTGVFTFEMVIKMIDLGLVLHQGAYFRDLWNILDFIVVSGALVAFAFTGNSKGKDINTIKSLRVLRVLRPLKTIKRLPKLKAVFDCVVNSLKNVFNILIVYMLFMFIFAVVAVQLFKGKFFHCTDESKEFEKDCRGKYLLYEKNEVKARDREWKKYEFHYDNVLWALLTLFTVSTGEGWPQVLKHSVDATFENQGPSPGYRMEMSIFYVVYFVVFPFFFVNIFVALIIITFQEQGDKMMEEYSLEKNERACIDFAISAKPLTRHMPQNKQSFQYRMWQFVVSPPFEYTIMAMIALNTIVLMMKFYGASVAYENALRVFNIVFTSLFSLECVLKVMAFGILNYFRDAWNIFDFVTVLGSITDILVTEFGNNFINLSFLRLFRAARLIKLLRQGYTIRILLWTFVQSFKALPYVCLLIAMLFFIYAIIGMQVFGNIGIDVEDEDSDEDEFQITEHNNFRTFFQALMLLFRSATGEAWHNIMLSCLSGKPCDKNSGILTRECGNEFAYFYFVSFIFLCSFLMLNLFVAVIMDNFEYLTRDSSILGPHHLDEYVRVWAEYDPAA

SEQ ID NO: 69 - protein, 437 aa, Homo sapiens; identical to SEQ ID NO: 57

SEQ ID NO: 70 - protein, 10 aa, Homo sapiens
QQQQQQQQQQ

SEQ ID NO: 71 - protein, 294 aa, Homo sapiens
HSSSSSSSSSSSRRWPGRAGRPPAALGGTQAPRPSLWPEIGRPRGATAAAARPGWRGGSQARPGASPPGPVDTAGPGGRHLARTCPRGPRVPGTMATTGAPTTTRPMARAAGAARRPWPGPTTRHPPYDTRPRAPPGARPGLPGPRARPAPRLLGTAGDSPTATTRRTDWPGPAGRAPGRACTNPTARVTMIGAKPGRGGARPAPHAPHAHTPPEEPRRGRGGPAQRARERASRETPDSGEARAGPQGCPAETLGQKRPSWAATAPPNQPRSPHPRQGLSGGRQGADKPHSQGI

SEQ ID NO: 72 - protein, 294 aa, Homo sapiens; identical to SEQ ID NO: 71

SEQ ID NO: 73 - protein, 32 aa, Homo sapiens; identical to SEQ ID NO: 56

SEQ ID NO: 74 - protein, 2312 aa, Homo sapiens
MARFGDEMPARYGGGGSGAAAGVVVGSGGGRGAGGSRQGGQPGAQRMYKQSMAQRARTMALYNPIPVRQNCLTVNRSLFLFSEDNVVRKYAKKITEWPPFEYMILATIIANCIVLALEQHLPDDDKTPMSERLDDTEPYFIGIFCFEAGIKIIALGFAFHKGSYLRNGWNVMDFVVVLTGILATVGTEFDLRTLRAVRVLRPLKLVSGIPSLQVVLKSIMKAMIPLLQIGLLLFFAILIFAIIGLEFYMGKFHTTCFEEGTDDIQGESPAPCGTEEPARTCPNGTKCQPYWEGPNNGITQFDNILFAVLTVFQCITMEGWTDLLYNSNDASGNTWNWLYFIPLIIIGSFFMLNLVLGVLSGEFAKERERVENRRAFLKLRRQQQIERELNGYMEWISKAEEVILAEDETDGEQRHPFDGALRRTTIKKSKTDLLNPEEAEDQLADIASVGSPFARASIKSAKLENSTFFHKKERRMRFYIRRMVKTQAFYWTVLSLVALNTLCVAIVHYNQPEWLSDFLYYAEFIFLGLFMSEMFIKMYGLGTRPYFHSSFNCFDCGVIIGSIFEVIWAVIKPGTSFGISVLRALRLLRIFKVTKYWASLRNLVVSLLNSMKSIISLLFLLFLFIVVFALLGMQLFGGQFNFDEGTPPTNFDTFPAAIMTVFQILTGEDWNEVMYDGIKSQGGVQGGMVFSIYFIVLTLFGNYTLLNVFLAIAVDNLANAQELTKDEQEEEEAANQKLALQKAKEVAEVSPLSAANMSIAVKEQQKNQKPAKSVWEQRTSEMRKQNLLASREALYNEMDPDERWKAAYTRHLRPDMKTHLDRPLVVDPQENRNNNTNKSRAAEPTVDQRLGQQRAEDFLRKQARYHDRARDPSGSAGLDARRPWAGSQEAELSREGPYGRESDHHAREGSLEQPGFWEGEAERGKAGDPHRRHVHRQGGSRESRSGSPRTGADGEHRRHRAHRRPGEEGPEDKAERRARHREGSRPARGGEGEGEGPDGGERRRRHRHGAPATYEGDARREDKERRHRRRKENQGSGVPVSGPNLSTTRPIQQDLGRQDPPLAEDIDNMKNNKLATAESAAPHGSLGHAGLPQSPAKMGNSTDPGPMLAIPAMATNPQNAASRRTPNNPGNPSNPGPPKTPENSLIVTNPSGTQTNSAKTARKPDHTTVDIPPACPPPLNHTVVQVNKNANPDPLPKKEEEKKEEEEDDRGEDGPKPMPPYSSMFILSTTNPLRRLCHYILNLRYFEMCILMVIAMSSIALAAEDPVQPNAPRNNVLRYFDYVFTGVFTFEMVIKMIDLGLVLHQGAYFRDLWNILDFIVVSGALVAFAFTGNSKGKDINTIKSLRVLRVLRPLKTIKRLPKLKAVFDCVVNSLKNVFNILIVYMLFMFIFAVVAVQLFKGKFFHCTDESKEFEKDCRGKYLLYEKNEVKARDREWKKYEFHYDNVLWALLTLFTVSTGEGWPQVLKHSVDATFENQGPSPGYRMEMSIFYVVYFVVFPFFFVNIFVALIIITFQEQGDKMMEEYSLEKNERACIDFAISAKPLTRHMPQNKQSFQYRMWQFVVSPPFEYTIMAMIALNTIVLMMKFYGASVAYENALRVFNIVFTSLFSLECVLKVMAFGILNYFRDAWNIFDFVTVLGSITDILVTEFGNNFINLSFLRLFRAARLIKLLRQGYTIRILLWTFVQSFKALPYVCLLIAMLFFIYAIIGMQVFGNIGIDVEDEDSDEDEFQITEHNNFRTFFQALMLLFRSATGEAWHNIMLSCLSGKPCDKNSGILTRECGNEFAYFYFVSFIFLCSFLMLNLFVAVIMDNFEYLTRDSSILGPHHLDEYVRVWAEYDPAAWGRMPYLDMYQMLRHMSPPLGLGKKCPARVAYKRLLRMDLPVADDNTVHFNSTLMALIRTALDIKIAKGGADKQQMDAELRKEMMAIWPNLSQKTLDLLVTPHKSTDLTVGKIYAAMMIMEYYRQSKAKKLQAMREEQDRTPLMFQRMEPPSPTQEGGPGQNALPSTQLDPGGALMAHESGLKESPSWVTQRAQEMFQKTGTWSPEQGPPTDMPNSQPNSQSVEMREMGRDGYSDSEHYLPMEGQGRAASMPRLPAENQRRRGRPRGNNLSTISDTSPMKRSASVLGPKARRLDDYSLERVPPEENQRHHQRRRDRSHRASERSLGRYTDVDTGLGTDLSMTTQSGDLPSKERDQERGRPKDRKHRQHHHHHHHHHHPPPPDKDRYAQERPDHGRARARDQRWSRSPSEGREHMAHRQGSSSVSGSPAPSTSGTSTPRRGRRQLPQTPSTPRPHVSYSPVIRKAGGSGP

SEQ ID NO: 75 - protein, 23 aa, Homo sapiens
MSSWPTRPTKSTAPPRPGGKNGT

SEQ ID NO: 76 - protein, 1737 aa, Homo sapiens; identical to SEQ ID NO: 55

SEQ ID NO: 77 - protein, 32 aa, Homo sapiens; identical to SEQ ID NO: 56

SEQ ID NO: 78 - protein, 227 aa, Homo sapiens
KRLLRMDLPVADDNTVHFNSTLMALIRTALDIKIAKGGADKQQMDAELRKEMMAIWPNLSQKTLDLLVTPHKSTDLTVGKIYAAMMIMEYYRQSKAKKLQAMREEQDRTPLMFQRMEPPSPTQEGGPGQNALPSTQLDPGGALMAHESGLKESPSWVTQRAQEMFQKTGTWSPEQGPPTDMPNSQPNSQSVEMREMGRDGYSDSEHYLPMEGQGRAASMPRLPAENQ

SEQ ID NO: 79 - protein, 198 aa, Homo sapiens
TISDTSPMKRSASVLGPKARRLDDYSLERVPPEENQRHHQRRRDRSHRASERSLGRYTDVDTGLGTDLSMTTQSGDLPSKERDQERGRPKDRKHRQHHHHHHHHHHPPPPDKDRYAQERPDHGRARARDQRWSRSPSEGREHMAHRQGSSSVSGSPAPSTSGTSTPRRGRRQLPQTPSTPRPHVSYSPVIRKAGGSGP

SEQ ID NO: 80 - protein, 294 aa, Homo sapiens; identical to SEQ ID NO: 60

SEQ ID NO: 81 - protein, 23 aa, Homo sapiens
MSSWPTRPTKSTAPPRPGGKNGT

SEQ ID NO: 82 - protein, 294 aa, Homo sapiens; identical to SEQ ID NO: 60

SEQ ID NO: 83 - protein, 32 aa, Homo sapiens; identical to SEQ ID NO: 56

SEQ ID NO: 84 - protein, 2206 aa, Homo sapiens
TIIANCIVLALEQHLPDDDKTPMSERLDDTEPYFIGIFCFEAGIKIIALGFAFHKGSYLRNGWNVMDFVVVLTGILATVGTEFDLRTLRAVRVLRPLKLVSGIPSLQVVLKSIMKAMIPLLQIGLLLFFAILIFAIIGLEFYMGKFHTTCFEEGTDDIQGESPAPCGTEEPARTCPNGTKCQPYWEGPNNGITQFDNILFAVLTVFQCITMEGWTDLLYNSNDASGNTWNWLYFIPLIIIGSFFMLNLVLGVLSGEFAKERERVENRRAFLKLRRQQQIERELNGYMEWISKAEEVILAEDETDGEQRHPFDGALRRTTIKKSKTDLLNPEEAEDQLADIASVGSPFARASIKSAKLENSTFFHKKERRMRFYIRRMVKTQAFYWTVLSLVALNTLCVAIVHYNQPEWLSDFLYYAEFIFLGLFMSEMFIKMYGLGTRPYFHSSFNCFDCGVIIGSIFEVIWAVIKPGTSFGISVLRALRLLRIFKVTKYWASLRNLVVSLLNSMKSIISLLFLLFLFIVVFALLGMQLFGGQFNFDEGTPPTNFDTFPAAIMTVFQILTGEDWNEVMYDGIKSQGGVQGGMVFSIYFIVLTLFGNYTLLNVFLAIAVDNLANAQELTKDEQEEEEAANQKLALQKAKEVAEVSPLSAANMSIAVKEQQKNQKPAKSVWEQRTSEMRKQNLLASREALYNEMDPDERWKAAYTRHLRPDMKTHLDRPLVVDPQENRNNNTNKSRAAEPTVDQRLGQQRAEDFLRKQARYHDRARDPSGSAGLDARRPWAGSQEAELSREGPYGRESDHHAREGSLEQPGFWEGEAERGKAGDPHRRHVHRQGGSRESRSGSPRTGADGEHRRHRAHRRPGEEGPEDKAERRARHREGSRPARGGEGEGEGPDGGERRRRHRHGAPATYEGDARREDKERRHRRRKENQGSGVPVSGPNLSTTRPIQQDLGRQDPPLAEDIDNMKNNKLATAESAAPHGSLGHAGLPQSPAKMGNSTDPGPMLAIPAMATNPQNAASRRTPNNPGNPSNPGPPKTPENSLIVTNPSGTQTNSAKTARKPDHTTVDIPPACPPPLNHTVVQVNKNANPDPLPKKEEEKKEEEEDDRGEDGPKPMPPYSSMFILSTTNPLRRLCHYILNLRYFEMCILMVIAMSSIALAAEDPVQPNAPRNNVLRYFDYVFTGVFTFEMVIKMIDLGLVLHQGAYFRDLWNILDFIVVSGALVAFAFTGNSKGKDINTIKSLRVLRVLRPLKTIKRLPKLKAVFDCVVNSLKNVFNILIVYMLFMFIFAVVAVQLFKGKFFHCTDESKEFEKDCRGKYLLYEKNEVKARDREWKKYEFHYDNVLWALLTLFTVSTGEGWPQVLKHSVDATFENQGPSPGYRMEMSIFYVVYFVVFPFFFVNIFVALIIITFQEQGDKMMEEYSLEKNERACIDFAISAKPLTRHMPQNKQSFQYRMWQFVVSPPFEYTIMAMIALNTIVLMMKFYGASVAYENALRVFNIVFTSLFSLECVLKVMAFGILNYFRDAWNIFDFVTVLGSITDILVTEFGNNFINLSFLRLFRAARLIKLLRQGYTIRILLWTFVQSFKALPYVCLLIAMLFFIYAIIGMQVFGNIGIDVEDEDSDEDEFQITEHNNFRTFFQALMLLFRSATGEAWHNIMLSCLSGKPCDKNSGILTRECGNEFAYFYFVSFIFLCSFLMLNLFVAVIMDNFEYLTRDSSILGPHHLDEYVRVWAEYDPAAWGRMPYLDMYQMLRHMSPPLGLGKKCPARVAYKRLLRMDLPVADDNTVHFNSTLMALIRTALDIKIAKGGADKQQMDAELRKEMMAIWPNLSQKTLDLLVTPHKSTDLTVGKIYAAMMIMEYYRQSKAKKLQAMREEQDRTPLMFQRMEPPSPTQEGGPGQNALPSTQLDPGGALMAHESGLKESPSWVTQRAQEMFQKTGTWSPEQGPPTDMPNSQPNSQSVEMREMGRDGYSDSEHYLPMEGQGRAASMPRLPAENQRRRGRPRGNNLSTISDTSPMKRSASVLGPKARRLDDYSLERVPPEENQRHHQRRRDRSHRASERSLGRYTDVDTGLGTDLSMTTQSGDLPSKERDQERGRPKDRKHRQHHHHHHHHHHPPPPDKDRYAQERPDHGRARARDQRWSRSPSEGREHMAHRQGSSSVSGSPAPSTSGTSTPRRGRRQLPQTPSTPRPHVSYSPVIRKAGGSGP

SEQ ID NO: 85 - protein, 23 aa, Homo sapiens
MSSWPTRPTKSTAPPRPGGKNGT

SEQ ID NO: 86 - protein, 1996 aa, Homo sapiens
TIIANCIVLALEQHLPDDDKTPMSERLDDTEPYFIGIFCFEAGIKIIALGFAFHKGSYLRNGWNVMDFVVVLTGILATVGTEFDLRTLRAVRVLRPLKLVSGIPSLQVVLKSIMKAMIPLLQIGLLLFFAILIFAIIGLEFYMGKFHTTCFEEGTDDIQGESPAPCGTEEPARTCPNGTKCQPYWEGPNNGITQFDNILFAVLTVFQCITMEGWTDLLYNSNDASGNTWNWLYFIPLIIIGSFFMLNLVLGVLSGEFAKERERVENRRAFLKLRRQQQIERELNGYMEWISKAEEVILAEDETDGEQRHPFDGALRRTTIKKSKTDLLNPEEAEDQLADIASVGSPFARASIKSAKLENSTFFHKKERRMRFYIRRMVKTQAFYWTVLSLVALNTLCVAIVHYNQPEWLSDFLYYAEFIFLGLFMSEMFIKMYGLGTRPYFHSSFNCFDCGVIIGSIFEVIWAVIKPGTSFGISVLRALRLLRIFKVTKYWASLRNLVVSLLNSMKSIISLLFLLFLFIVVFALLGMQLFGGQFNFDEGTPPTNFDTFPAAIMTVFQILTGEDWNEVMYDGIKSQGGVQGGMVFSIYFIVLTLFGNYTLLNVFLAIAVDNLANAQELTKDEQEEEEAANQKLALQKAKEVAEVSPLSAANMSIAVKEQQKNQKPAKSVWEQRTSEMRKQNLLASREALYNEMDPDERWKAAYTRHLRPDMKTHLDRPLVVDPQENRNNNTNKSRAAEPTVDQRLGQQRAEDFLRKQARYHDRARDPSGSAGLDARRPWAGSQEAELSREGPYGRESDHHAREGSLEQPGFWEGEAERGKAGDPHRRHVHRQGGSRESRSGSPRTGADGEHRRHRAHRRPGEEGPEDKAERRARHREGSRPARGGEGEGEGPDGGERRRRHRHGAPATYEGDARREDKERRHRRRKENQGSGVPVSGPNLSTTRPIQQDLGRQDPPLAEDIDNMKNNKLATAESAAPHGSLGHAGLPQSPAKMGNSTDPGPMLAIPAMATNPQNAASRRTPNNPGNPSNPGPPKTPENSLIVTNPSGTQTNSAKTARKPDHTTVDIPPACPPPLNHTVVQVNKNANPDPLPKKEEEKKEEEEDDRGEDGPKPMPPYSSMFILSTTNPLRRLCHYILNLRYFEMCILMVIAMSSIALAAEDPVQPNAPRNNVLRYFDYVFTGVFTFEMVIKMIDLGLVLHQGAYFRDLWNILDFIVVSGALVAFAFTGNSKGKDINTIKSLRVLRVLRPLKTIKRLPKLKAVFDCVVNSLKNVFNILIVYMLFMFIFAVVAVQLFKGKFFHCTDESKEFEKDCRGKYLLYEKNEVKARDREWKKYEFHYDNVLWALLTLFTVSTGEGWPQVLKHSVDATFENQGPSPGYRMEMSIFYVVYFVVFPFFFVNIFVALIIITFQEQGDKMMEEYSLEKNERACIDFAISAKPLTRHMPQNKQSFQYRMWQFVVSPPFEYTIMAMIALNTIVLMMKFYGASVAYENALRVFNIVFTSLFSLECVLKVMAFGILNYFRDAWNIFDFVTVLGSITDILVTEFGNNFINLSFLRLFRAARLIKLLRQGYTIRILLWTFVQSFKALPYVCLLIAMLFFIYAIIGMQVFGNIGIDVEDEDSDEDEFQITEHNNFRTFFQALMLLFRSATGEAWHNIMLSCLSGKPCDKNSGILTRECGNEFAYFYFVSFIFLCSFLMLNLFVAVIMDNFEYLTRDSSILGPHHLDEYVRVWAEYDPAAWGRMPYLDMYQMLRHMSPPLGLGKKCPARVAYKRLLRMDLPVADDNTVHFNSTLMALIRTALDIKIAKGGADKQQMDAELRKEMMAIWPNLSQKTLDLLVTPHKSTDLTVGKIYAAMMIMEYYRQSKAKKLQAMREEQDRTPLMFQRMEPPSPTQEGGPGQNALPSTQLDPGGALMAHESGLKESPSWVTQRAQEMFQKTGTWSPEQGPPTDMPNSQPNSQSVEMREMGRDGYSDSEHYLPMEGQGRAASMPRLPAENQ

SEQ ID NO: 87 - protein, 198 aa, Homo sapiens; identical to SEQ ID NO: 79

SEQ ID NO: 88 - protein, 294 aa, Homo sapiens; identical to SEQ ID NO: 60

SEQ ID NO: 89 - protein, 23 aa, Homo sapiens
MSSWPTRPTKSTAPPRPGGKNGT

SEQ ID NO: 90 - protein, 294 aa, Homo sapiens; identical to SEQ ID NO: 60

SEQ ID NO: 91 - protein, 2206 aa, Homo sapiens; identical to SEQ ID NO: 84

SEQ ID NO: 92 - protein, 23 aa, Homo sapiens
MSSWPTRPTKSTAPPRPGGKNGT

SEQ ID NO: 93 - protein, 1584 aa, Homo sapiens
TIIANCIVLALEQHLPDDDKTPMSERLDDTEPYFIGIFCFEAGIKIIALGFAFHKGSYLRNGWNVMDFVVVLTGILATVGTEFDLRTLRAVRVLRPLKLVSGIPSLQVVLKSIMKAMIPLLQIGLLLFFAILIFAIIGLEFYMGKFHTTCFEEGTDDIQGESPAPCGTEEPARTCPNGTKCQPYWEGPNNGITQFDNILFAVLTVFQCITMEGWTDLLYNSNDASGNTWNWLYFIPLIIIGSFFMLNLVLGVLSGEFAKERERVENRRAFLKLRRQQQIERELNGYMEWISKAEEVILAEDETDGEQRHPFDGALRRTTIKKSKTDLLNPEEAEDQLADIASVGSPFARASIKSAKLENSTFFHKKERRMRFYIRRMVKTQAFYWTVLSLVALNTLCVAIVHYNQPEWLSDFLYYAEFIFLGLFMSEMFIKMYGLGTRPYFHSSFNCFDCGVIIGSIFEVIWAVIKPGTSFGISVLRALRLLRIFKVTKYWASLRNLVVSLLNSMKSIISLLFLLFLFIVVFALLGMQLFGGQFNFDEGTPPTNFDTFPAAIMTVFQILTGEDWNEVMYDGIKSQGGVQGGMVFSIYFIVLTLFGNYTLLNVFLAIAVDNLANAQELTKDEQEEEEAANQKLALQKAKEVAEVSPLSAANMSIAVKEQQKNQKPAKSVWEQRTSEMRKQNLLASREALYNEMDPDERWKAAYTRHLRPDMKTHLDRPLVVDPQENRNNNTNKSRAAEPTVDQRLGQQRAEDFLRKQARYHDRARDPSGSAGLDARRPWAGSQEAELSREGPYGRESDHHAREGSLEQPGFWEGEAERGKAGDPHRRHVHRQGGSRESRSGSPRTGADGEHRRHRAHRRPGEEGPEDKAERRARHREGSRPARGGEGEGEGPDGGERRRRHRHGAPATYEGDARREDKERRHRRRKENQGSGVPVSGPNLSTTRPIQQDLGRQDPPLAEDIDNMKNNKLATAESAAPHGSLGHAGLPQSPAKMGNSTDPGPMLAIPAMATNPQNAASRRTPNNPGNPSNPGPPKTPENSLIVTNPSGTQTNSAKTARKPDHTTVDIPPACPPPLNHTVVQVNKNANPDPLPKKEEEKKEEEEDDRGEDGPKPMPPYSSMFILSTTNPLRRLCHYILNLRYFEMCILMVIAMSSIALAAEDPVQPNAPRNNVLRYFDYVFTGVFTFEMVIKMIDLGLVLHQGAYFRDLWNILDFIVVSGALVAFAFTGNSKGKDINTIKSLRVLRVLRPLKTIKRLPKLKAVFDCVVNSLKNVFNILIVYMLFMFIFAVVAVQLFKGKFFHCTDESKEFEKDCRGKYLLYEKNEVKARDREWKKYEFHYDNVLWALLTLFTVSTGEGWPQVLKHSVDATFENQGPSPGYRMEMSIFYVVYFVVFPFFFVNIFVALIIITFQEQGDKMMEEYSLEKNERACIDFAISAKPLTRHMPQNKQSFQYRMWQFVVSPPFEYTIMAMIALNTIVLMMKFYGASVAYENALRVFNIVFTSLFSLECVLKVMAFGILNYFRDAWNIFDFVTVLGSITDILVTEFGNNFINLSFLRLFRAARLIKLLRQGYTIRILLWTFVQSFK

SEQ ID NO: 94 - protein, 37 aa, Homo sapiens
CPTPTTRHTHTHTRSQTHTRVLAGYTKPYYYCLQKSI

SEQ ID NO: 95 - protein, 23 aa, Homo sapiens
MSSWPTRPTKSTAPPRPGGKNGT

SEQ ID NO: 96 - protein, 37 aa, Homo sapiens; identical to SEQ ID NO: 94

SEQ ID NO: 97 - protein, 1584 aa, Homo sapiens; identical to SEQ ID NO: 93

SEQ ID NO: 98 - protein, 426 aa, Homo sapiens
MSESEGGKDTTPEPSPANGAGPGPEWGLCPGPPAVEGESSGASGLGTPKRRNQHSKHKTVAVASAQRSPRALFCLTLANPLRRSCISIVEWKPFDILILLTIFANCVALGVYIPFPEDDSNTANHNLEQVEYVFLVIFTVETVLKIVAYGLVLHPSAYIRNGWNLLDFIIVVVGLFSVLLEQGPGRPGDAPHTGGKPGGFDVKALRAFRVLRPLRLVSGVPSLHIVLNSIMKALVPLLHIALLVLFVIIIYAIIGLELFLGRMHKTCYFLGSDMEAEEDPSPCASSGSGRACTLNQTECRGRWPGPNGGITNFDNFFFAMLTVFQCVTMEGWTDVLYWMQDAMGYELPWVYFVSLVIFGSFFVLNLVLGVLSGEFSKEREKAKARGDFQKQREKQQMEEDLRGYLDWITQAEELDMEDPSADDNLG

SEQ ID NO: 99 - protein, 11 aa, Homo sapiens
SMAEEGRAGHR

SEQ ID NO: 100 - protein, 1037 aa, Homo sapiens
PQLAELTNRRRGRLRWFSHSTRSTHSTSSHASLPASDTGSMTETQGDEDEEEGALASCTRCLNKIMKTRVCRRLRRANRVLRARCRRAVKSNACYWAVLLLVFLNTLTIASEHHGQPVWLTQIQEYANKVLLCLFTVEMLLKLYGLGPSAYVSSFFNRFDCFVVCGGILETTLVEVGAMQPLGISVLRCVRLLRIFKVTRHWASLSNLVASLLNSMKSIASLLLLLFLFIIIFSLLGMQLFGGKFNFDQTHTKRSTFDTFPQALLTVFQILTGEDWNVVMYDGIMAYGGPFFPGMLVCIYFIILFICGNYILLNVFLAIAVDNLASGDAGTAKDKGGEKSNEKDLPQENEGLVPGVEKEEEEGARREGADMEEEEEEEEEEEEEEEEEGAGGVELLQEVVPKEKVVPIPEGSAFFCLSQTNPLRKGCHTLIHHHVFTNLILVFIILSSVSLAAEDPIRAHSFRNHILGYFDYAFTSIFTVEILLKMTVFGAFLHRGSFCRSWFNMLDLLVVSVSLISFGIHSSAISVVKILRVLRVLRPLRAINRAKGLKHVVQCVFVAIRTIGNIMIVTTLLQFMFACIGVQLFKGKFYTCTDEAKHTPQECKGSFLVYPDGDVSRPLVRERLWVNSDFNFDNVLSAMMALFTVSTFEGWPALLYKAIDAYAEDHGPIYNYRVEISVFFIVYIIIIAFFMMNIFVGFVIITFRAQGEQEYQNCELDKNQRQCVEYALKAQPLRRYIPKNPHQYRVWATVNSAAFEYLMFLLILLNTVALAMQHYEQTAPFNYAMDILNMVFTGLFTIEMVLKIIAFKPKHYFTDAWNTFDALIVVGSIVDIAVTEVNNGGHLGESSEDSSRISITFFRLFRVMRLVKLLSKGEGIRTLLWTFIKSFQALPYVALLIAMIFFIYAVIGMQMFGKVALQDGTQINRNNNFQTFPQAVLLLFRCATGEAWQEIMLASLPGNRCDPESDFGPGEEFTCGSNFAIAYFISFFMLCAFLIINLFVAVIMDNFDYLTRDWSILGPHHLDEFKRIWSEYDPGAK

SEQ ID NO: 101 - protein, 7 aa, Homo sapiens
YALYTLT

SEQ ID NO: 102 - protein, 11 aa, Homo sapiens
SMAEEGRAGHR

SEQ ID NO: 103 - protein, 7 aa, Homo sapiens
YALYTLT

SEQ ID NO: 104 - protein, 1463 aa, Homo sapiens
MSESEGGKDTTPEPSPANGAGPGPEWGLCPGPPAVEGESSGASGLGTPKRRNQHSKHKTVAVASAQRSPRALFCLTLANPLRRSCISIVEWKPFDILILLTIFANCVALGVYIPFPEDDSNTANHNLEQVEYVFLVIFTVETVLKIVAYGLVLHPSAYIRNGWNLLDFIIVVVGLFSVLLEQGPGRPGDAPHTGGKPGGFDVKALRAFRVLRPLRLVSGVPSLHIVLNSIMKALVPLLHIALLVLFVIIIYAIIGLELFLGRMHKTCYFLGSDMEAEEDPSPCASSGSGRACTLNQTECRGRWPGPNGGITNFDNFFFAMLTVFQCVTMEGWTDVLYWMQDAMGYELPWVYFVSLVIFGSFFVLNLVLGVLSGEFSKEREKAKARGDFQKQREKQQMEEDLRGYLDWITQAEELDMEDPSADDNLGPQLAELTNRRRGRLRWFSHSTRSTHSTSSHASLPASDTGSMTETQGDEDEEEGALASCTRCLNKIMKTRVCRRLRRANRVLRARCRRAVKSNACYWAVLLLVFLNTLTIASEHHGQPVWLTQIQEYANKVLLCLFTVEMLLKLYGLGPSAYVSSFFNRFDCFVVCGGILETTLVEVGAMQPLGISVLRCVRLLRIFKVTRHWASLSNLVASLLNSMKSIASLLLLLFLFIIIFSLLGMQLFGGKFNFDQTHTKRSTFDTFPQALLTVFQILTGEDWNVVMYDGIMAYGGPFFPGMLVCIYFIILFICGNYILLNVFLAIAVDNLASGDAGTAKDKGGEKSNEKDLPQENEGLVPGVEKEEEEGARREGADMEEEEEEEEEEEEEEEEEGAGGVELLQEVVPKEKVVPIPEGSAFFCLSQTNPLRKGCHTLIHHHVFTNLILVFIILSSVSLAAEDPIRAHSFRNHILGYFDYAFTSIFTVEILLKMTVFGAFLHRGSFCRSWFNMLDLLVVSVSLISFGIHSSAISVVKILRVLRVLRPLRAINRAKGLKHVVQCVFVAIRTIGNIMIVTTLLQFMFACIGVQLFKGKFYTCTDEAKHTPQECKGSFLVYPDGDVSRPLVRERLWVNSDFNFDNVLSAMMALFTVSTFEGWPALLYKAIDAYAEDHGPIYNYRVEISVFFIVYIIIIAFFMMNIFVGFVIITFRAQGEQEYQNCELDKNQRQCVEYALKAQPLRRYIPKNPHQYRVWATVNSAAFEYLMFLLILLNTVALAMQHYEQTAPFNYAMDILNMVFTGLFTIEMVLKIIAFKPKHYFTDAWNTFDALIVVGSIVDIAVTEVNNGGHLGESSEDSSRISITFFRLFRVMRLVKLLSKGEGIRTLLWTFIKSFQALPYVALLIAMIFFIYAVIGMQMFGKVALQDGTQINRNNNFQTFPQAVLLLFRCATGEAWQEIMLASLPGNRCDPESDFGPGEEFTCGSNFAIAYFISFFMLCAFLIINLFVAVIMDNFDYLTRDWSILGPHHLDEFKRIWSEYDPGAK

SEQ ID NO: 105 - protein, 970 aa, Homo sapiens
MDEEEDGAGAEESGQPRSFMRLNDLSGAGGRPGPGSAEKDPGSADSEAEGLPYPALAPVVFFYLSQDSRPRSWCLRTVCNPWFERISMLVILLNCVTLGMFRPCEDIACDSQRCRILQAFDDFIFAFFAVEMVVKMVALGIFGKKCYLGDTWNRLDFFIVIAGMLEYSLDLQNVSFSAVRTVRVLRPLRAINRVPSMRILVTLLLDTLPMLGNVLLLCFFVFFIFGIVGVQLWAGLLRNRCFLPENFSLPLSVDLERYYQTENEDESPFICSQPRENGMRSCRSVPTLRGDGGGGPPCGLDYEAYNSSSNTTCVNWNQYYTNCSAGEHNPFKGAINFDNIGYAWIAIFQVITLEGWVDIMYFVMDAHSFYNFIYFILLIIVGSFFMINLCLVVIATQFSETKQRESQLMREQRVRFLSNASTLASFSEPGSCYEELLKYLVYILRKAARRLAQVSRAAGVRVGLLSSPAPLGGQETQPSSSCSRSHRRLSVHHLVHHHHHHHHHYHLGNGTLRAPRASPEIQDRDANGSRRLMLPPPSTPALSGAPPGGAESVHSFYHADCHLEPVRCQAPPPRSPSEASGRTVGSGKVYPTVHTSPPPETLKEKALVEVAASSGPPTLTSLNIPPGPYSSMHKLLETQSTGACQSSCKISSPCLKADSGACGPDSCPYCARAGAGEVELADREMPDSDSEAVYEFTQDAQHSDLRDPHSRRQRSLGPDAEPSSVLAFWRLICDTFRKIVDSKYFGRGIMIAILVNTLSMGIEYHEQPEELTNALEISNIVFTSLFALEMLLKLLVYGPFGYIKNPYNIFDGVIVVISVWEIVGQQGGGLSVLRTFRLMRVLKLVRFLPALQRQLVVLMKTMDNVATFCMLLMLFIFIFSILGMHLFGCKFASERDGDTLPDRKNFDSLLWAIVTVFQILTQEDWNKVLYNGMASTSSWAALYFIALMTFGNYVLFNLLVAILVEGFQAE

SEQ ID NO: 106 - protein, 575 aa, Homo sapiens
GDANKSESEPDFFSPSLDGDGDRKKCLALVSLGEHPELRKSLLPPLIIHTAATPMSLPKSTSTGLGEALGPASRRTSSSGSAEPGAAHEMKSPPSARSSPHSPWSAASSWTSRRSSRNSLGRAPSLKRRSPSGERRSLLSGEGQESQDEEESSEEERASPAGSDHRHRGSLEREAKSSFDLPDTLQVPGLHRTASGRGSASEHQDCNGKSASGRLARALRPDDPPLDGDDADDEGNLSKGERVRAWIRARLPACCLERDSWSAYIFPPQSRFRLLCHRIITHKMFDHVVLVIIFLNCITIAMERPKIDPHSAERIFLTLSNYIFTAVFLAEMTVKVVALGWCFGEQAYLRSSWNVLDGLLVLISVIDILVSMVSDSGTKILGMLRVLRLLRTLRPLRVISRAQGLKLVVETLMSSLKPIGNIVVICCAFFIIFGILGVQLFKGKFFVCQGEDTRNITNKSDCAEASYRWVRHKYNFDNLGQALMSLFVLASKDGWVDIMYDGLDAVGVDQQPIMNHNPWMLLYFISFLLIVAFFVLNMFVGVVVENFHKCRQHQEEEEARRREEKRLRRLEKKRR

SEQ ID NO: 107 - protein, 358 aa, Homo sapiens
LMLDDVIASGSSASAASEAQCKPYYSDYSRFRLLVHHLCTSHYLDLFITGVIGLNVVTMAMEHYQQPQILDEALKICNYIFTVIFVLESVFKLVAFGFRRFFQDRWNQLDLAIVLLSIMGITLEEIEVNASLPINPTIIRIMRVLRIARVLKLLKMAVGMRALLDTVMQALPQVGNLGLLFMLLFFIFAALGVELFGDLECDETHPCEGLGRHATFRNFGMAFLTLFRVSTGDNWNGIMKDTLRDCDQESTCYNTVISPIYFVSFVLTAQFVLVNVVIAVLMKHLEESNKEAKEEAELEAELELEMKTLSPQPHSPLGSPFLWPGVEGPDSPDSPKPGALHPAAHARSASHFSLEHPT

SEQ ID NO: 108 - protein, 357 aa, Homo sapiens [sequence omitted]

SEQ ID NO: 109 - protein, 8 aa, Homo sapiens
SKEKQMAD

SEQ ID NO: 110 - protein, 6 aa, Homo sapiens
KAKQMA

SEQ ID NO: 111 - protein, 2377 aa, Homo sapiens
MDEEEDGAGAEESGQPRSFMRLNDLSGAGGRPGPGSAEKDPGSADSEAEGLPYPALAPVVFFYLSQDSRPRSWCLRTVCNPWFERISMLVILLNCVTLGMFRPCEDIACDSQRCRILQAFDDFIFAFFAVEMVVKMVALGIFGKKCYLGDTWNRLDFFIVIAGMLEYSLDLQNVSFSAVRTVRVLRPLRAINRVPSMRILVTLLLDTLPMLGNVLLLCFFVFFIFGIVGVQLWAGLLRNRCFLPENFSLPLSVDLERYYQTENEDESPFICSQPRENGMRSCRSVPTLRGDGGGGPPCGLDYEAYNSSSNTTCVNWNQYYTNCSAGEHNPFKGAINFDNIGYAWIAIFQVITLEGWVDIMYFVMDAHSFYNFIYFILLIIVGSFFMINLCLVVIATQFSETKQRESQLMREQRVRFLSNASTLASFSEPGSCYEELLKYLVYILRKAARRLAQVSRAAGVRVGLLSSPAPLGGQETQPSSSCSRSHRRLSVHHLVHHHHHHHHHYHLGNGTLRAPRASPEIQDRDANGSRRLMLPPPSTPALSGAPPGGAESVHSFYHADCHLEPVRCQAPPPRSPSEASGRTVGSGKVYPTVHTSPPPETLKEKALVEVAASSGPPTLTSLNIPPGPYSSMHKLLETQSTGACQSSCKISSPCLKADSGACGPDSCPYCARAGAGEVELADREMPDSDSEAVYEFTQDAQHSDLRDPHSRRQRSLGPDAEPSSVLAFWRLICDTFRKIVDSKYFGRGIMIAILVNTLSMGIEYHEQPEELTNALEISNIVFTSLFALEMLLKLLVYGPFGYIKNPYNIFDGVIVVISVWEIVGQQGGGLSVLRTFRLMRVLKLVRFLPALQRQLVVLMKTMDNVATFCMLLMLFIFIFSILGMHLFGCKFASERDGDTLPDRKNFDSLLWAIVTVFQILTQEDWNKVLYNGMASTSSWAALYFIALMTFGNYVLFNLLVAILVEGFQAEEISKREDASGQLSCIQLPVDSQGGDANKSESEPDFFSPSLDGDGDRKKCLALVSLGEHPELRKSLLPPLIIHTAATPMSLPKSTSTGLGEALGPASRRTSSSGSAEPGAAHEMKSPPSARSSPHSPWSAASSWTSRRSSRNSLGRAPSLKRRSPSGERRSLLSGEGQESQDEEESSEEERASPAGSDHRHRGSLEREAKSSFDLPDTLQVPGLHRTASGRGSASEHQDCNGKSASGRLARALRPDDPPLDGDDADDEGNLSKGERVRAWIRARLPACCLERDSWSAYIFPPQSRFRLLCHRIITHKMFDHVVLVIIFLNCITIAMERPKIDPHSAERIFLTLSNYIFTAVFLAEMTVKVVALGWCFGEQAYLRSSWNVLDGLLVLISVIDILVSMVSDSGTKILGMLRVLRLLRTLRPLRVISRAQGLKLVVETLMSSLKPIGNIVVICCAFFIIFGILGVQLFKGKFFVCQGEDTRNITNKSDCAEASYRWVRHKYNFDNLGQALMSLFVLASKDGWVDIMYDGLDAVGVDQQPIMNHNPWMLLYFISFLLIVAFFVLNMFVGVVVENFHKCRQHQEEEEARRREEKRLRRLEKKRRNLMLDDVIASGSSASAASEAQCKPYYSDYSRFRLLVHHLCTSHYLDLFITGVIGLNVVTMAMEHYQQPQILDEALKICNYIFTVIFVLESVFKLVAFGFRRFFQDRWNQLDLAIVLLSIMGITLEEIEVNASLPINPTIIRIMRVLRIARVLKLLKMAVGMRALLDTVMQALPQVGNLGLLFMLLFFIFAALGVELFGDLECDETHPCEGLGRHATFRNFGMAFLTLFRVSTGDNWNGIMKDTLRDCDQESTCYNTVISPIYFVSFVLTAQFVLVNVVIAVLMKHLEESNKEAKEEAELEAELELEMKTLSPQPHSPLGSPFLWPGVEGPDSPDSPKPGALHPAAHARSASHFSLEHPTDRQLFDTISLLIQGSLEWELKLMDELAGPGGQPSAFPSAPSLGGSDPQIPLAEMEALSLTSEIVSEPSCSLALTDDSLPDDMHTLLLSALESNMQPHPTELPGPDLLTVRKSGVSRTHSLPNDSYMCRHGSTAEGPLGHRGWGLPKAQSGSVLSVHSQPADTSYILQLPKDAPHLLQPHSAPTWGTIPKLPPPGRSPLAQRPLRRQAAIRTDSLDVQGLGSREDLLAEVSGPSPPLARAYSFWGQSSTQAQQHSRSHSKISKHMTPPAPCPGPEPNWGKGPPETRSSLELDTELSWISGDLLPPGGQEEPPSPRDLKKCYSVEAQSCQRRPTSWLDEQRRHSIAVSCLDSGSQPHLGTDPSNLGGQPLGGPGSRPKKKLSPPSITIDPPESQGPRTPPSPGICLRRRAPSSDSKDPLASGPPDSMAASPSPKKDVLSLSGLSSDPADLDP

SEQ ID NO: 112 - protein, 970 aa, Homo sapiens; identical to SEQ ID NO: 105

SEQ ID NO: 113 - protein, 511 aa, Homo sapiens
GDANKSESEPDFFSPSLDGDGDRKKCLALVSLGEHPELRKSLLPPLIIHTAATPMSLPKSTSTGLGEALGPASRRTSSSGSAEPGAAHEMKSPPSARSSPHSPWSAASSWTSRRSSRNSLGRAPSLKRRSPSGERRSLLSGEGQESQDEEESSEEERASPAGSDHRHRGSLEREAKSSFDLPDTLQVPGLHRTASGRGSASEHQDCNGKSASGRLARALRPDDPPLDGDDADDEGNLSKGERVRAWIRARLPACCLERDSWSAYIFPPQSRFRLLCHRIITHKMFDHVVLVIIFLNCITIAMERPKIDPHSAERIFLTLSNYIFTAVFLAEMTVKVVALGWCFGEQAYLRSSWNVLDGLLVLISVIDILVSMVSDSGTKILGMLRVLRLLRTLRPLRVISRAQGLKLVVETLMSSLKPIGNIVVICCAFFIIFGILGVQLFKGKFFVCQGEDTRNITNKSDCAEASYRWVRHKYNFDNLGQALMSLFVLASKDGWVDIMYDGLDAVGVDQQ

SEQ ID NO: 114 - protein, 32 aa, Homo sapiens
VGLRWAGSICGLRSLSMGCFQDRKSKAGCKMP

SEQ ID NO: 115 - protein, 32 aa, Homo sapiens; identical to SEQ ID NO: 114

SEQ ID NO: 116 - protein, 1504 aa, Homo sapiens
MDEEEDGAGAEESGQPRSFMRLNDLSGAGGRPGPGSAEKDPGSADSEAEGLPYPALAPVVFFYLSQDSRPRSWCLRTVCNPWFERISMLVILLNCVTLGMFRPCEDIACDSQRCRILQAFDDFIFAFFAVEMVVKMVALGIFGKKCYLGDTWNRLDFFIVIAGMLEYSLDLQNVSFSAVRTVRVLRPLRAINRVPSMRILVTLLLDTLPMLGNVLLLCFFVFFIFGIVGVQLWAGLLRNRCFLPENFSLPLSVDLERYYQTENEDESPFICSQPRENGMRSCRSVPTLRGDGGGGPPCGLDYEAYNSSSNTTCVNWNQYYTNCSAGEHNPFKGAINFDNIGYAWIAIFQVITLEGWVDIMYFVMDAHSFYNFIYFILLIIVGSFFMINLCLVVIATQFSETKQRESQLMREQRVRFLSNASTLASFSEPGSCYEELLKYLVYILRKAARRLAQVSRAAGVRVGLLSSPAPLGGQETQPSSSCSRSHRRLSVHHLVHHHHHHHHHYHLGNGTLRAPRASPEIQDRDANGSRRLMLPPPSTPALSGAPPGGAESVHSFYHADCHLEPVRCQAPPPRSPSEASGRTVGSGKVYPTVHTSPPPETLKEKALVEVAASSGPPTLTSLNIPPGPYSSMHKLLETQSTGACQSSCKISSPCLKADSGACGPDSCPYCARAGAGEVELADREMPDSDSEAVYEFTQDAQHSDLRDPHSRRQRSLGPDAEPSSVLAFWRLICDTFRKIVDSKYFGRGIMIAILVNTLSMGIEYHEQPEELTNALEISNIVFTSLFALEMLLKLLVYGPFGYIKNPYNIFDGVIVVISVWEIVGQQGGGLSVLRTFRLMRVLKLVRFLPALQRQLVVLMKTMDNVATFCMLLMLFIFIFSILGMHLFGCKFASERDGDTLPDRKNFDSLLWAIVTVFQILTQEDWNKVLYNGMASTSSWAALYFIALMTFGNYVLFNLLVAILVEGFQAEEISKREDASGQLSCIQLPVDSQGGDANKSESEPDFFSPSLDGDGDRKKCLALVSLGEHPELRKSLLPPLIIHTAATPMSLPKSTSTGLGEALGPASRRTSSSGSAEPGAAHEMKSPPSARSSPHSPWSAASSWTSRRSSRNSLGRAPSLKRRSPSGERRSLLSGEGQESQDEEESSEEERASPAGSDHRHRGSLEREAKSSFDLPDTLQVPGLHRTASGRGSASEHQDCNGKSASGRLARALRPDDPPLDGDDADDEGNLSKGERVRAWIRARLPACCLERDSWSAYIFPPQSRFRLLCHRIITHKMFDHVVLVIIFLNCITIAMERPKIDPHSAERIFLTLSNYIFTAVFLAEMTVKVVALGWCFGEQAYLRSSWNVLDGLLVLISVIDILVSMVSDSGTKILGMLRVLRLLRTLRPLRVISRAQGLKLVVETLMSSLKPIGNIVVICCAFFIIFGILGVQLFKGKFFVCQGEDTRNITNKSDCAEASYRWVRHKYNFDNLGQALMSLFVLASKDGWVDIMYDGLDAVGVDQQ

SEQ ID NO: 117 - protein, 1586 aa, Homo sapiens
MTEGARAADEVRVPLGAPPPGPAALVGASPESPGAPGREAERGSELGVSPSESPAAERGAELGADEEQRVPYPALAATVFFCLGQTTRPRSWCLRLVCNPWFEHVSMLVIMLNCVTLGMFRPCEDVECGSERCNILEAFDAFIFAFFAVEMVIKMVALGLFGQKCYLGDTWNRLDFFIVVAGMMEYSLDGHNVSLSAIRTVRVLRPLRAINRVPSMRILVTLLLDTLPMLGNVLLLCFFVFFIFGIVGVQLWAGLLRNRCFLDSAFVRNNNLTFLRPYYQTEEGEENPFICSSRRDNGMQKCSHIPGRRELRMPCTLGWEAYTQPQAEGVGAARNACINWNQYYNVCRSGDSNPHNGAINFDNIGYAWIAIFQVITLEGWVDIMYYVMDAHSFYNFIYFILLIIVGSFFMINLCLVVIATQFSETKQRESQLMREQRARHLSNDSTLASFSEPGSCYEELLKYVGHIFRKVKRRSLRLYARWQSRWRKKVDPSAVQGQGPGHRQRRAGRHTASVHHLVYHHHHHHHHHYHFSHGSPRRPGPEPGACDTRLVRAGAPPSPPSPGRGPPDAESVHSIYHADCHIEGPQERARVAHAAATAAASLRLATGLGTMNYPTILPSGVGSGKGSTSPGPKGKWAGGPPGTGGHGPLSLNSPDPYEKIPHVVGEHGLGQAPGHLSGLSVPCPLPSPPAGTLTCELKSCPYCTRALEDPEGELSGSESGDSDGRGVYEFTQDVRHGDRWDPTRPPRATDTPGPGPGSPQRRAQQRAAPGEPGWMGRLWVTFSGKLRRIVDSKYFSRGIMMAILVNTLSMGVEYHEQPEELTNALEISNIVFTSMFALEMLLKLLACGPLGYIRNPYNIFDGIIVVISVWEIVGQADGGLSVLRTFRLLRVLKLVRFLPALRRQLVVLVKTMDNVATFCTLLMLFIFIFSILGMHLFGCKFSLKTDTGDTVPDRKNFDSLLWAIVTVFQILTQEDWNVVLYNGMASTSSWAALYFVALMTFGNYVLFNLLVAILVEGFQAEGDANRSDTDEDKTSVHFEEDFHKLRELQTTELKMCSLAVTPNGHLEGRGSLSPPLIMCTAATPMPTPKSSPFLDAAPSLPDSRRGSSSSGDPPLGDQKPPASLRSSPCAPWGPSGAWSSRRSSWSSLGRAPSLKRRGQCGERESLLSGEGKGSTDDEAEDGRAAPGPRATPLRRAESLDPRPLRPAALPPTKCRDRDGQVVALPSDFFLRIDSHREDAAELDDDSEDSCCLRLHKVLEPYKPQWCRSREAWALYLFSPQNRFRVSCQKVITHKMFDHVVLVFIFLNCVTIALERPDIDPGSTERVFLSVSNYIFTAIFVAEMMVKVVALGLLSGEHAYLQSSWNLLDGLLVLVSLVDIVVAMASAGGAKILGVLRVLRLLRTLRPLRVISRAPGLKLVVETLISSLRPIGNIVLICCAFFIIFGILGVQLFKGKFYYCEGPDTRNISTKAQCRAAHYRWVRRKYNFDNLGQALMSLFVLSSKDGWVNIMYDGLDAVGVDQQPVQNHNPWMLLYFISFLLIVSFFVLNMFVGVVVENFHKCRQHQEAEEARRREEKRLRRLERRRR

SEQ ID NO: 118 - protein, 760 aa, Homo sapiens
AQRRPYYADYSPTRRSIHSLCTSHYLDLFITFIICVNVITMSMEHYNQPKSLDEALKYCNYVFTIVFVFEAALKLVAFGFRRFFKDRWNQLDLAIVLLSLMGITLEEIEMSAALPINPTIIRIMRVLRIARVLKLLKMATGMRALLDTVVQALPQVGNLGLLFMLLFFIYAALGVELFGRLECSEDNPCEGLSRHATFSNFGMAFLTLFRVSTGDNWNGIMKDTLRECSREDKHCLSYLPALSPVYFVTFVLVAQFVLVNVVVAVLMKHLEESNKEAREDAELDAEIELEMAQGPGSARRVDADRPPLPQESPGARDAPNLVARKVSVSRMLSLPNDSYMFRPVVPASAPHPRPLQEVEMETYGAGTPLGSVASVHSPPAESCASLQIPLAVSSPARSGEPLHALSPRGTARSPSLSRLLCRQEAVHTDSLEGKIDSPRDTLDPAEPGEKTPVRPVTQGGSLQSPPRSPRPASVRTRKHTFGQRCVSSRPAAPGGEEAEASDPADEEVSHITSSACPWQPTAEPHGPEASPVAGGERDLRRLYSVDAQGFLDKPGRADEQWRPSAELGSGEPGEAKAWGPEAEPALGARRKKKMSPPCISVEPPAEDEGSARPSAAEGGSTTLRRRTPSCEATPHRDSLEPTEGSGAGGDPAAKGERWGQASCRAEHLTVPSFAFEPLDLGVPSGDPFLDGSHSVTPESRASSSGAIVPLEPPESEPPMPVGDPPEKRRGLYLTVPQCPLEKPGSPSATPAPGGGADDPV

SEQ ID NO: 119 - protein, 2353 aa, Homo sapiens
MTEGARAADEVRVPLGAPPPGPAALVGASPESPGAPGREAERGSELGVSPSESPAAERGAELGADEEQRVPYPALAATVFFCLGQTTRPRSWCLRLVCNPWFEHVSMLVIMLNCVTLGMFRPCEDVECGSERCNILEAFDAFIFAFFAVEMVIKMVALGLFGQKCYLGDTWNRLDFFIVVAGMMEYSLDGHNVSLSAIRTVRVLRPLRAINRVPSMRILVTLLLDTLPMLGNVLLLCFFVFFIFGIVGVQLWAGLLRNRCFLDSAFVRNNNLTFLRPYYQTEEGEENPFICSSRRDNGMQKCSHIPGRRELRMPCTLGWEAYTQPQAEGVGAARNACINWNQYYNVCRSGDSNPHNGAINFDNIGYAWIAIFQVITLEGWVDIMYYVMDAHSFYNFIYFILLIIVGSFFMINLCLVVIATQFSETKQRESQLMREQRARHLSNDSTLASFSEPGSCYEELLKYVGHIFRKVKRRSLRLYARWQSRWRKKVDPSAVQGQGPGHRQRRAGRHTASVHHLVYHHHHHHHHHYHFSHGSPRRPGPEPGACDTRLVRAGAPPSPPSPGRGPPDAESVHSIYHADCHIEGPQERARVAHAAATAAASLRLATGLGTMNYPTILPSGVGSGKGSTSPGPKGKWAGGPPGTGGHGPLSLNSPDPYEKIPHVVGEHGLGQAPGHLSGLSVPCPLPSPPAGTLTCELKSCPYCTRALEDPEGELSGSESGDSDGRGVYEFTQDVRHGDRWDPTRPPRATDTPGPGPGSPQRRAQQRAAPGEPGWMGRLWVTFSGKLRRIVDSKYFSRGIMMAILVNTLSMGVEYHEQPEELTNALEISNIVFTSMFALEMLLKLLACGPLGYIRNPYNIFDGIIVVISVWEIVGQADGGLSVLRTFRLLRVLKLVRFLPALRRQLVVLVKTMDNVATFCTLLMLFIFIFSILGMHLFGCKFSLKTDTGDTVPDRKNFDSLLWAIVTVFQILTQEDWNVVLYNGMASTSSWAALYFVALMTFGNYVLFNLLVAILVEGFQAEGDANRSDTDEDKTSVHFEEDFHKLRELQTTELKMCSLAVTPNGHLEGRGSLSPPLIMCTAATPMPTPKSSPFLDAAPSLPDSRRGSSSSGDPPLGDQKPPASLRSSPCAPWGPSGAWSSRRSSWSSLGRAPSLKRRGQCGERESLLSGEGKGSTDDEAEDGRAAPGPRATPLRRAESLDPRPLRPAALPPTKCRDRDGQVVALPSDFFLRIDSHREDAAELDDDSEDSCCLRLHKVLEPYKPQWCRSREAWALYLFSPQNRFRVSCQKVITHKMFDHVVLVFIFLNCVTIALERPDIDPGSTERVFLSVSNYIFTAIFVAEMMVKVVALGLLSGEHAYLQSSWNLLDGLLVLVSLVDIVVAMASAGGAKILGVLRVLRLLRTLRPLRVISRAPGLKLVVETLISSLRPIGNIVLICCAFFIIFGILGVQLFKGKFYYCEGPDTRNISTKAQCRAAHYRWVRRKYNFDNLGQALMSLFVLSSKDGWVNIMYDGLDAVGVDQQPVQNHNPWMLLYFISFLLIVSFFVLNMFVGVVVENFHKCRQHQEAEEARRREEKRLRRLERRRRSTFPSPEAQRRPYYADYSPTRRSIHSLCTSHYLDLFITFIICVNVITMSMEHYNQPKSLDEALKYCNYVFTIVFVFEAALKLVAFGFRRFFKDRWNQLDLAIVLLSLMGITLEEIEMSAALPINPTIIRIMRVLRIARVLKLLKMATGMRALLDTVVQALPQVGNLGLLFMLLFFIYAALGVELFGRLECSEDNPCEGLSRHATFSNFGMAFLTLFRVSTGDNWNGIMKDTLRECSREDKHCLSYLPALSPVYFVTFVLVAQFVLVNVVVAVLMKHLEESNKEAREDAELDAEIELEMAQGPGSARRVDADRPPLPQESPGARDAPNLVARKVSVSRMLSLPNDSYMFRPVVPASAPHPRPLQEVEMETYGAGTPLGSVASVHSPPAESCASLQIPLAVSSPARSGEPLHALSPRGTARSPSLSRLLCRQEAVHTDSLEGKIDSPRDTLDPAEPGEKTPVRPVTQGGSLQSPPRSPRPASVRTRKHTFGQRCVSSRPAAPGGEEAEASDPADEEVSHITSSACPWQPTAEPHGPEASPVAGGERDLRRLYSVDAQGFLDKPGRADEQWRPSAELGSGEPGEAKAWGPEAEPALGARRKKKMSPPCISVEPPAEDEGSARPSAAEGGSTTLRRRTPSCEATPHRDSLEPTEGSGAGGDPAAKGERWGQASCRAEHLTVPSFAFEPLDLGVPSGDPFLDGSHSVTPESRASSSGAIVPLEPPESEPPMPVGDPPEKRRGLYLTVPQCPLEKPGSPSATPAPGGGADDPV

SEQ ID NO: 120 - protein, 653 aa, Homo sapiens
MHLFGCKFSLKTDTGDTVPDRKNFDSLLWAIVTVFQILTQEDWNVVLYNGMASTSSWAALYFVALMTFGNYVLFNLLVAILVEGFQAEGDANRSDTDEDKTSVHFEEDFHKLRELQTTELKMCSLAVTPNGHLEGRGSLSPPLIMCTAATPMPTPKSSPFLDAAPSLPDSRRGSSSSGDPPLGDQKPPASLRSSPCAPWGPSGAWSSRRSSWSSLGRAPSLKRRGQCGERESLLSGEGKGSTDDEAEDGRAAPGPRATPLRRAESLDPRPLRPAALPPTKCRDRDGQVVALPSDFFLRIDSHREDAAELDDDSEDSCCLRLHKVLEPYKPQWCRSREAWALYLFSPQNRFRVSCQKVITHKMFDHVVLVFIFLNCVTIALERPDIDPGSTERVFLSVSNYIFTAIFVAEMMVKVVALGLLSGEHAYLQSSWNLLDGLLVLVSLVDIVVAMASAGGAKILGVLRVLRLLRTLRPLRVISRAPGLKLVVETLISSLRPIGNIVLICCAFFIIFGILGVQLFKGKFYYCEGPDTRNISTKAQCRAAHYRWVRRKYNFDNLGQALMSLFVLSSKDGWVNIMYDGLDAVGVDQQPVQNHNPWMLLYFISFLLIVSFFVLNMFVGVVVENFHKCRQHQEAEEARRREEKRLRRLERRRR

SEQ ID NO: 121 - protein, 760 aa, Homo sapiens; identical to SEQ ID NO: 118

SEQ ID NO: 122 - protein, 1420 aa, Homo sapiens
MHLFGCKFSLKTDTGDTVPDRKNFDSLLWAIVTVFQILTQEDWNVVLYNGMASTSSWAALYFVALMTFGNYVLFNLLVAILVEGFQAEGDANRSDTDEDKTSVHFEEDFHKLRELQTTELKMCSLAVTPNGHLEGRGSLSPPLIMCTAATPMPTPKSSPFLDAAPSLPDSRRGSSSSGDPPLGDQKPPASLRSSPCAPWGPSGAWSSRRSSWSSLGRAPSLKRRGQCGERESLLSGEGKGSTDDEAEDGRAAPGPRATPLRRAESLDPRPLRPAALPPTKCRDRDGQVVALPSDFFLRIDSHREDAAELDDDSEDSCCLRLHKVLEPYKPQWCRSREAWALYLFSPQNRFRVSCQKVITHKMFDHVVLVFIFLNCVTIALERPDIDPGSTERVFLSVSNYIFTAIFVAEMMVKVVALGLLSGEHAYLQSSWNLLDGLLVLVSLVDIVVAMASAGGAKILGVLRVLRLLRTLRPLRVISRAPGLKLVVETLISSLRPIGNIVLICCAFFIIFGILGVQLFKGKFYYCEGPDTRNISTKAQCRAAHYRWVRRKYNFDNLGQALMSLFVLSSKDGWVNIMYDGLDAVGVDQQPVQNHNPWMLLYFISFLLIVSFFVLNMFVGVVVENFHKCRQHQEAEEARRREEKRLRRLERRRRSTFPSPEAQRRPYYADYSPTRRSIHSLCTSHYLDLFITFIICVNVITMSMEHYNQPKSLDEALKYCNYVFTIVFVFEAALKLVAFGFRRFFKDRWNQLDLAIVLLSLMGITLEEIEMSAALPINPTIIRIMRVLRIARVLKLLKMATGMRALLDTVVQALPQVGNLGLLFMLLFFIYAALGVELFGRLECSEDNPCEGLSRHATFSNFGMAFLTLFRVSTGDNWNGIMKDTLRECSREDKHCLSYLPALSPVYFVTFVLVAQFVLVNVVVAVLMKHLEESNKEAREDAELDAEIELEMAQGPGSARRVDADRPPLPQESPGARDAPNLVARKVSVSRMLSLPNDSYMFRPVVPASAPHPRPLQEVEMETYGAGTPLGSVASVHSPPAESCASLQIPLAVSSPARSGEPLHALSPRGTARSPSLSRLLCRQEAVHTDSLEGKIDSPRDTLDPAEPGEKTPVRPVTQGGSLQSPPRSPRPASVRTRKHTFGQRCVSSRPAAPGGEEAEASDPADEEVSHITSSACPWQPTAEPHGPEASPVAGGERDLRRLYSVDAQGFLDKPGRADEQWRPSAELGSGEPGEAKAWGPEAEPALGARRKKKMSPPCISVEPPAEDEGSARPSAAEGGSTTLRRRTPSCEATPHRDSLEPTEGSGAGGDPAAKGERWGQASCRAEHLTVPSFAFEPLDLGVPSGDPFLDGSHSVTPESRASSSGAIVPLEPPESEPPMPVGDPPEKRRGLYLTVPQCPLEKPGSPSATPAPGGGADDPV

SEQ ID NO: 123 - protein, 268 aa, Homo sapiens
MTEGARAADEVRVPLGAPPPGPAALVGASPESPGAPGREAERGSELGVSPSESPAAERGAELGADEEQRVPYPALAATVFFCLGQTTRPRSWCLRLVCNPWFEHVSMLVIMLNCVTLGMFRPCEDVECGSERCNILEAFDAFIFAFFAVEMVIKMVALGLFGQKCYLGDTWNRLDFFIVVAGMMEYSLDGHNVSLSAIRTVRVLRPLRAINRVPSMRILVTLLLDTLPMLGNVLLLCFFVFFIFGIVGVQLWAGLLRNRCFLDSAFVR

SEQ ID NO: 124 - protein, 19 aa, Homo sapiens
CPGPTPVRPLPRWPCPPCR

SEQ ID NO: 125 - protein, 19 aa, Homo sapiens
CPGPTPVRPLPRWPCPPCR

SEQ ID NO: 126 - protein, 277 aa, Homo sapiens
MTEGARAADEVRVPLGAPPPGPAALVGASPESPGAPGREAERGSELGVSPSESPAAERGAELGADEEQRVPYPALAATVFFCLGQTTRPRSWCLRLVCNPWFEHVSMLVIMLNCVTLGMFRPCEDVECGSERCNILEAFDAFIFAFFAVEMVIKMVALGLFGQKCYLGDTWNRLDFFIVVAGMMEYSLDGHNVSLSAIRTVRVLRPLRAINRVPSMRILVTLLLDTLPMLGNVLLLCFFVFFIFGIVGVQLWAGLLRNRCFLDSAFVRNNNLTFLRP

SEQ ID NO: 127 - protein, 463 aa, Homo sapiens
MVNENTRMYIPEENHQGSNYGSPRPAHANMNANAAAGLAPEHIPTPGAALSWQAAIDAARQAKLMGSAGNATISTVSSTQRKRQQYGKPKKQGSTTATRPPRALLCLTLKNPIRRACISIVEWKPFEIIILLTIFANCVALAIYIPFPEDDSNATNSNLERVEYLFLIIFTVEAFLKVIAYGLLFHPNAYLRNGWNLLDFIIVVVGLFSAILEQATKADGANALGGKGAGFDVKALRAFRVLRPLRLVSGVPSLQVVLNSIIKAMVPLLHIALLVLFVIIIYAIIGLELFMGKMHKTCYNQEGIADVPAEDDPSPCALETGHGRQCQNGTVCKPGWDGPKHGITNFDNFAFAMLTVFQCITMEGWTDVLYWVNDAVGRDWPWIYFVTLIIIGSFFVLNLVLGVLSGEFSKEREKAKARGDFQKLREKQQLEEDLKGYLDWITQAEDIDPENEDEGMDEEKPRN

SEQ ID NO: 128 - protein, 26 aa, Homo sapiens
RGTPAGMLDQKKGKFAWFSHSTETHV

SEQ ID NO: 129 - protein, 467 aa, Homo sapiens
SMPTSETESVNTENVAGGDIEGENCGARLAHRISKSKFSRYWRRWNRFCRRKCRAAVKSNVFYWLVIFLVFLNTLTIASEHYNQPNWLTEVQDTANKALLALFTAEMLLKMYSLGLQAYFVSLFNRFDCFVVCGGILETILVETKIMSPLGISVLRCVRLLRIFKITRYWNSLSNLVASLLNSVRSIASLLLLLFLFIIIFSLLGMQLFGGKFNFDEMQTRRSTFDNFPQSLLTVFQILTGEDWNSVMYDGIMAYGGPSFPGMLVCIYFIILFICGNYILLNVFLAIAVDNLADAESLTSAQKEEEEEKERKKLARTASPEKKQELVEKPAVGESKEEKIELKSITADGESPPATKINMDDLQPNENEDKSPYPNPETTGEEDEEEPEMPVGPRPRPLSELHLKEKAVPMPEASAFFIFSSNNRFRLQCHRIVNDTIFTNLILFFILLSSISLAAEDPVQHTSFRNH

SEQ ID NO: 130 - protein, 33 aa, Homo sapiens
VCIACVFCTPSPWGCARPTASVADIIVQSGAQF

SEQ ID NO: 131 - protein, 26 aa, Homo sapiens
RGTPAGMLDQKKGKFAWFSHSTETHV

SEQ ID NO: 132 - protein, 33 aa, Homo sapiens; identical to SEQ ID NO: 130

SEQ ID NO: 133 - protein, 932 aa, Homo sapiens
MVNENTRMYIPEENHQGSNYGSPRPAHANMNANAAAGLAPEHIPTPGAALSWQAAIDAARQAKLMGSAGNATISTVSSTQRKRQQYGKPKKQGSTTATRPPRALLCLTLKNPIRRACISIVEWKPFEIIILLTIFANCVALAIYIPFPEDDSNATNSNLERVEYLFLIIFTVEAFLKVIAYGLLFHPNAYLRNGWNLLDFIIVVVGLFSAILEQATKADGANALGGKGAGFDVKALRAFRVLRPLRLVSGVPSLQVVLNSIIKAMVPLLHIALLVLFVIIIYAIIGLELFMGKMHKTCYNQEGIADVPAEDDPSPCALETGHGRQCQNGTVCKPGWDGPKHGITNFDNFAFAMLTVFQCITMEGWTDVLYWVNDAVGRDWPWIYFVTLIIIGSFFVLNLVLGVLSGEFSKEREKAKARGDFQKLREKQQLEEDLKGYLDWITQAEDIDPENEDEGMDEEKPRNMSMPTSETESVNTENVAGGDIEGENCGARLAHRISKSKFSRYWRRWNRFCRRKCRAAVKSNVFYWLVIFLVFLNTLTIASEHYNQPNWLTEVQDTANKALLALFTAEMLLKMYSLGLQAYFVSLFNRFDCFVVCGGILETILVETKIMSPLGISVLRCVRLLRIFKITRYWNSLSNLVASLLNSVRSIASLLLLLFLFIIIFSLLGMQLFGGKFNFDEMQTRRSTFDNFPQSLLTVFQILTGEDWNSVMYDGIMAYGGPSFPGMLVCIYFIILFICGNYILLNVFLAIAVDNLADAESLTSAQKEEEEEKERKKLARTASPEKKQELVEKPAVGESKEEKIELKSITADGESPPATKINMDDLQPNENEDKSPYPNPETTGEEDEEEPEMPVGPRPRPLSELHLKEKAVPMPEASAFFIFSSNNRFRLQCHRIVNDTIFTNLILFFILLSSISLAAEDPVQHTSFRNHI

SEQ ID NO: 134 - protein, 54 aa, Homo sapiens
MNANAAAGLAPEHIPTPGAALSWQAAIDAARQAKLMGSAGNATISTVSSTQRKR

SEQ ID NO: 135 - protein, 287 aa, Homo sapiens
QYGKPKKQGSTTATRPPRALLCLTLKNPIRRACISIVEWKPFEIIILLTIFANCVALAIYIPFPEDDSNATNSNLERVEYLFLIIFTVEAFLKVIAYGLLFHPNAYLRNGWNLLDFIIVVVGLFSAILEQATKADGANALGGKGAGFDVKALRAFRVLRPLRLVSGVPSLQVVLNSIIKAMVPLLHIALLVLFVIIIYAIIGLELFMGKMHKTCYNQEGIADVPAEDDPSPCALETGHGRQCQNGTVCKPGWDGPKHGITNFDNFAFAMLTVFQCITMEGWTDVLYW

SEQ ID NO: 136 - protein, 20 aa, Homo sapiens
MQDAMGYELPWVYFVSLVIF

SEQ ID NO: 137 - protein, 558 aa, Homo sapiens
GSFFVLNLVLGVLSGEFSKEREKAKARGDFQKLREKQQLEEDLKGYLDWITQAEDIDPENEDEGMDEEKPRNMSMPTSETESVNTENVAGGDIEGENCGARLAHRISKSKFSRYWRRWNRFCRRKCRAAVKSNVFYWLVIFLVFLNTLTIASEHYNQPNWLTEVQDTANKALLALFTAEMLLKMYSLGLQAYFVSLFNRFDCFVVCGGILETILVETKIMSPLGISVLRCVRLLRIFKITRYWNSLSNLVASLLNSVRSIASLLLLLFLFIIIFSLLGMQLFGGKFNFDEMQTRRSTFDNFPQSLLTVFQILTGEDWNSVMYDGIMAYGGPSFPGMLVCIYFIILFICGNYILLNVFLAIAVDNLADAESLTSAQKEEEEEKERKKLARTASPEKKQELVEKPAVGESKEEKIELKSITADGESPPATKINMDDLQPNENEDKSPYPNPETTGEEDEEEPEMPVGPRPRPLSELHLKEKAVPMPEASAFFIFSSNNRFRLQCHRIVNDTIFTNLILFFILLSSISLAAEDPVQHTSFRNHILFYFDIVFTTIFTIEIA

SEQ ID NO: 138 - protein, 327 aa, Homo sapiens
LKMTAYGAFLHKGSFCRNYFNILDLLVVSVSLISFGIQSSAINVVKILRVLRVLRPLRAINRAKGLKHVVQCVFVAIRTIGNIVIVTTLLQFMFACIGVQLFKGKLYTCSDSSKQTEAECKGNYITYKDGEVDHPIIQPRSWENSKFDFDNVLAAMMALFTVSTFEGWPELLYRSIDSHTEDKGPIYNYRVEISIFFIIYIIIIAFFMMNIFVGFVIVTFQEQGEQEYKNCELDKNQRQCVEYALKARPLRRYIPKNQHQYKVWYVVNSTYFEYLMFVLILLNTICLAMQHYGQSCLFKIAMNILNMLFTGLFTVEMILKLIAFKPK

SEQ ID NO: 139 - protein, 28 aa, Homo sapiens
HYFCDAWNTFDALIVVGSIVDIAITEVN

SEQ ID NO: 140 - protein, 500 aa, Homo sapiens
NAEENSRISITFFRLFRVMRLVKLLSRGEGIRTLLWTFIKSFQALPYVALLIVMLFFIYAVIGMQVFGKIALNDTTEINRNNNFQTFPQAVLLLFRCATGEAWQDIMLACMPGKKCAPESEPSNSTEGETPCGSSFAVFYFISFYMLCAFLIINLFVAVIMDNFDYLTRDWSILGPHHLDEFKRIWAEYDPEAKGRIKHLDVVTLLRRIQPPLGFGKLCPHRVACKRLVSMNMPLNSDGTVMFNATLFALVRTALRIKTEGNLEQANEELRAIIKKIWKRTSMKLLDQVVPPAGDDEVTVGKFYATFLIQEYFRKFKKRKEQGLVGKPSQRNALSLQAGLRTLHDIGPEIRRAISGDLTAEEELDKAMKEAVSAASEDDIFRRAGGLFGNHVSYYQSDGRSAFPQTFTTQRPLHINKAGSSQGDTESPSHEKLVDSTFTPSSYSSTGSNANINNANNTALGRLPRPAGYPSTVSTVEGHGPPLSPAIRVQEVAWKLSSNR

SEQ ID NO: 141 - protein, 70 aa, Homo sapiens
MHCCDMLDGGTFPPALGPRRAPPCLHQQLQGSLAGLREDTPCIVPGHASLCCSSRVGEWLPAGCTAPQHA

SEQ ID NO: 142 - protein, 307 aa, Homo sapiens
RCHSRESQAAMAGQEETSQDETYEVKMNHDTEACSEPSLLSTEMLSYQDDENRQLTLPEEDKRDIRQSPKRGFLRSASLGRRASFHLECLKRQKDRGGDISQKTVLPLHLVHHQALAVAGLSPLLQRSHSPASFPRPFATPPATPGSRGWPPQPVPTLRLEGVESSEKLNSSFPSIHCGSWAETTPGGGGSSAARRVRPVSLMVPSQAGAPGRQFHGSASSLVEAVLISEGLGQFAQDPKFIEVTTQELADACDMTIEEMESAADNILSGGAPQSPNGALLPFVNCRDAGQDRAGGEEDAGCVRARG

SEQ ID NO: 143 - protein, 16 aa, Homo sapiens
PSEEELQDSRVYVSSL

SEQ ID NO: 144 - protein, 47 aa, Homo sapiens
CLHQQLQGSLAGLREDTPCIVPGHASLCCSSRVGEWLPAGCTAPQHA

SEQ ID NO: 145 - protein, 20 aa, Homo sapiens
MQDAMGYELPWVYFVSLVIF

SEQ ID NO: 146 - protein, 70 aa, Homo sapiens; identical to SEQ ID NO: 141

SEQ ID NO: 147 - protein, 2192 aa, Homo sapiens
MNANAAAGLAPEHIPTPGAALSWQAAIDAARQAKLMGSAGNATISTVSSTQRKRQQYGKPKKQGSTTATRPPRALLCLTLKNPIRRACISIVEWKPFEIIILLTIFANCVALAIYIPFPEDDSNATNSNLERVEYLFLIIFTVEAFLKVIAYGLLFHPNAYLRNGWNLLDFIIVVVGLFSAILEQATKADGANALGGKGAGFDVKALRAFRVLRPLRLVSGVPSLQVVLNSIIKAMVPLLHIALLVLFVIIIYAIIGLELFMGKMHKTCYNQEGIADVPAEDDPSPCALETGHGRQCQNGTVCKPGWDGPKHGITNFDNFAFAMLTVFQCITMEGWTDVLYWVNDAVGRDWPWIYFVTLIIIGSFFVLNLVLGVLSGEFSKEREKAKARGDFQKLREKQQLEEDLKGYLDWITQAEDIDPENEDEGMDEEKPRNMSMPTSETESVNTENVAGGDIEGENCGARLAHRISKSKFSRYWRRWNRFCRRKCRAAVKSNVFYWLVIFLVFLNTLTIASEHYNQPNWLTEVQDTANKALLALFTAEMLLKMYSLGLQAYFVSLFNRFDCFVVCGGILETILVETKIMSPLGISVLRCVRLLRIFKITRYWNSLSNLVASLLNSVRSIASLLLLLFLFIIIFSLLGMQLFGGKFNFDEMQTRRSTFDNFPQSLLTVFQILTGEDWNSVMYDGIMAYGGPSFPGMLVCIYFIILFICGNYILLNVFLAIAVDNLADAESLTSAQKEEEEEKERKKLARTASPEKKQELVEKPAVGESKEEKIELKSITADGESPPATKINMDDLQPNENEDKSPYPNPETTGEEDEEEPEMPVGPRPRPLSELHLKEKAVPMPEASAFFIFSSNNRFRLQCHRIVNDTIFTNLILFFILLSSISLAAEDPVQHTSFRNHILFYFDIVFTTIFTIEIALKILGNADYVFTSIFTLEIILKMTAYGAFLHKGSFCRNYFNILDLLVVSVSLISFGIQSSAINVVKILRVLRVLRPLRAINRAKGLKHVVQCVFVAIRTIGNIVIVTTLLQFMFACIGVQLFKGKLYTCSDSSKQTEAECKGNYITYKDGEVDHPIIQPRSWENSKFDFDNVLAAMMALFTVSTFEGWPELLYRSIDSHTEDKGPIYNYRVEISIFFIIYIIIIAFFMMNIFVGFVIVTFQEQGEQEYKNCELDKNQRQCVEYALKARPLRRYIPKNQHQYKVWYVVNSTYFEYLMFVLILLNTICLAMQHYGQSCLFKIAMNILNMLFTGLFTVEMILKLIAFKPKGYFSDPWNVFDFLIVIGSIIDVILSETNHYFCDAWNTFDALIVVGSIVDIAITEVNPAEHTQCSPSMNAEENSRISITFFRLFRVMRLVKLLSRGEGIRTLLWTFIKSFQALPYVALLIVMLFFIYAVIGMQVFGKIALNDTTEINRNNNFQTFPQAVLLLFRCATGEAWQDIMLACMPGKKCAPESEPSNSTEGETPCGSSFAVFYFISFYMLCAFLIINLFVAVIMDNFDYLTRDWSILGPHHLDEFKRIWAEYDPEAKGRIKHLDVVTLLRRIQPPLGFGKLCPHRVACKRLVSMNMPLNSDGTVMFNATLFALVRTALRIKTEGNLEQANEELRAIIKKIWKRTSMKLLDQVVPPAGDDEVTVGKFYATFLIQEYFRKFKKRKEQGLVGKPSQRNALSLQAGLRTLHDIGPEIRRAISGDLTAEEELDKAMKEAVSAASEDDIFRRAGGLFGNHVSYYQSDGRSAFPQTFTTQRPLHINKAGSSQGDTESPSHEKLVDSTFTPSSYSSTGSNANINNANNTALGRLPRPAGYPSTVSTVEGHGPPLSPAIRVQEVAWKLSSNRERHVPVCEDLELRRDSGSAGTQAHCLLLRRANPSRCHSRESQAAMAGQEETSQDETYEVKMNHDTEACSEPSLLSTEMLSYQDDENRQLTLPEEDKRDIRQSPKRGFLRSASLGRRASFHLECLKRQKDRGGDISQKTVLPLHLVHHQALAVAGLSPLLQRSHSPASFPRPFATPPATPGSRGWPPQPVPTLRLEGVESSEKLNSSFPSIHCGSWAETTPGGGGSSAARRVRPVSLMVPSQAGAPGRQFHGSASSLVEAVLISEGLGQFAQDPKFIEVTTQELADACDMTIEEMESAADNILSGGAPQSPNGALLPFVNCRDAGQDRAGGEEDAGCVRARGAPSEEELQDSRVYVSSL

SEQ ID NO: 148 - protein, 206 aa, Homo sapiens; identical to SEQ ID NO: 6

SEQ ID NO: 149 - protein, 206 aa, Homo sapiens; identical to SEQ ID NO: 6

SEQ ID NO: 150 - protein, 406 aa, Homo sapiens; identical to SEQ ID NO: 7

SEQ ID NO: 151 - protein, 406 aa, Homo sapiens; identical to SEQ ID NO: 7

SEQ ID NO: 152 - protein, 463 aa, Homo sapiens; identical to SEQ ID NO: 127

SEQ ID NO: 153 - protein, 26 aa, Homo sapiens
RGTPAGMLDQKKGKFAWFSHSTETHV

SEQ ID NO: 154 - protein, 485 aa, Homo sapiens
SMPTSETESVNTENVAGGDIEGENCGARLAHRISKSKFSRYWRRWNRFCRRKCRAAVKSNVFYWLVIFLVFLNTLTIASEHYNQPNWLTEVQDTANKALLALFTAEMLLKMYSLGLQAYFVSLFNRFDCFVVCGGILETILVETKIMSPLGISVLRCVRLLRIFKITRYWNSLSNLVASLLNSVRSIASLLLLLFLFIIIFSLLGMQLFGGKFNFDEMQTRRSTFDNFPQSLLTVFQILTGEDWNSVMYDGIMAYGGPSFPGMLVCIYFIILFICGNYILLNVFLAIAVDNLADAESLTSAQKEEEEEKERKKLARTASPEKKQELVEKPAVGESKEEKIELKSITADGESPPATKINMDDLQPNENEDKSPYPNPETTGEEDEEEPEMPVGPRPRPLSELHLKEKAVPMPEASAFFIFSSNNRFRLQCHRIVNDTIFTNLILFFILLSSISLAAEDPVQHTSFRNHILFYFDIVFTTIFTIEIA

SEQ ID NO: 155 - protein, 327 aa, Homo sapiens; identical to SEQ ID NO: 138

SEQ ID NO: 156 - protein, 299 aa, Homo sapiens
HYFCDAWNTFDALIVVGSIVDIAITEVNPAEHTQCSPSMNAEENSRISITFFRLFRVMRLVKLLSRGEGIRTLLWTFIKSFQALPYVALLIVMLFFIYAVIGMQVFGKIALNDTTEINRNNNFQTFPQAVLLLFRCATGEAWQDIMLACMPGKKCAPESEPSNSTEGETPCGSSFAVFYFISFYMLCAFLIINLFVAVIMDNFDYLTRDWSILGPHHLDEFKRIWAEYDPEAKGRIKHLDVVTLLRRIQPPLGFGKLCPHRVACKRLVSMNMPLNSDGTVMFNATLFALVRTALRIKTE

SEQ ID NO: 157 - protein, 19 aa, Homo sapiens
EGPSPSEAHQGAEDPFRPA

SEQ ID NO: 158 - protein, 239 aa, Homo sapiens
GNLEQANEELRAIIKKIWKRTSMKLLDQVVPPAGDDEVTVGKFYATFLIQEYFRKFKKRKEQGLVGKPSQRNALSLQAGLRTLHDIGPEIRRAISGDLTAEEELDKAMKEAVSAASEDDIFRRAGGLFGNHVSYYQSDGRSAFPQTFTTQRPLHINKAGSSQGDTESPSHEKLVDSTFTPSSYSSTGSNANINNANNTALGRLPRPAGYPSTVSTVEGHGPPLSPAIRVQEVAWKLSSN

SEQ ID NO: 159 - protein, 324 aa, Homo sapiens
RCHSRESQAAMAGQEETSQDETYEVKMNHDTEACSEPSLLSTEMLSYQDDENRQLTLPEEDKRDIRQSPKRGFLRSASLGRRASFHLECLKRQKDRGGDISQKTVLPLHLVHHQALAVAGLSPLLQRSHSPASFPRPFATPPATPGSRGWPPQPVPTLRLEGVESSEKLNSSFPSIHCGSWAETTPGGGGSSAARRVRPVSLMVPSQAGAPGRQFHGSASSLVEAVLISEGLGQFAQDPKFIEVTTQELADACDMTIEEMESAADNILSGGAPQSPNGALLPFVNCRDAGQDRAGGEEDAGCVRARGAPSEEELQDSRVYVSSL

SEQ ID NO: 160 - protein, 26 aa, Homo sapiens
RGTPAGMLDQKKGKFAWFSHSTETHV

SEQ ID NO: 161 - protein, 19 aa, Homo sapiens
EGPSPSEAHQGAEDPFRPA

SEQ ID NO: 162 - protein, 2221 aa, Homo sapiens
MVNENTRMYIPEENHQGSNYGSPRPAHANMNANAAAGLAPEHIPTPGAALSWQAAIDAARQAKLMGSAGNATISTVSSTQRKRQQYGKPKKQGSTTATRPPRALLCLTLKNPIRRACISIVEWKPFEIIILLTIFANCVALAIYIPFPEDDSNATNSNLERVEYLFLIIFTVEAFLKVIAYGLLFHPNAYLRNGWNLLDFIIVVVGLFSAILEQATKADGANALGGKGAGFDVKALRAFRVLRPLRLVSGVPSLQVVLNSIIKAMVPLLHIALLVLFVIIIYAIIGLELFMGKMHKTCYNQEGIADVPAEDDPSPCALETGHGRQCQNGTVCKPGWDGPKHGITNFDNFAFAMLTVFQCITMEGWTDVLYWVNDAVGRDWPWIYFVTLIIIGSFFVLNLVLGVLSGEFSKEREKAKARGDFQKLREKQQLEEDLKGYLDWITQAEDIDPENEDEGMDEEKPRNMSMPTSETESVNTENVAGGDIEGENCGARLAHRISKSKFSRYWRRWNRFCRRKCRAAVKSNVFYWLVIFLVFLNTLTIASEHYNQPNWLTEVQDTANKALLALFTAEMLLKMYSLGLQAYFVSLFNRFDCFVVCGGILETILVETKIMSPLGISVLRCVRLLRIFKITRYWNSLSNLVASLLNSVRSIASLLLLLFLFIIIFSLLGMQLFGGKFNFDEMQTRRSTFDNFPQSLLTVFQILTGEDWNSVMYDGIMAYGGPSFPGMLVCIYFIILFICGNYILLNVFLAIAVDNLADAESLTSAQKEEEEEKERKKLARTASPEKKQELVEKPAVGESKEEKIELKSITADGESPPATKINMDDLQPNENEDKSPYPNPETTGEEDEEEPEMPVGPRPRPLSELHLKEKAVPMPEASAFFIFSSNNRFRLQCHRIVNDTIFTNLILFFILLSSISLAAEDPVQHTSFRNHILFYFDIVFTTIFTIEIALKILGNADYVFTSIFTLEIILKMTAYGAFLHKGSFCRNYFNILDLLVVSVSLISFGIQSSAINVVKILRVLRVLRPLRAINRAKGLKHVVQCVFVAIRTIGNIVIVTTLLQFMFACIGVQLFKGKLYTCSDSSKQTEAECKGNYITYKDGEVDHPIIQPRSWENSKFDFDNVLAAMMALFTVSTFEGWPELLYRSIDSHTEDKGPIYNYRVEISIFFIIYIIIIAFFMMNIFVGFVIVTFQEQGEQEYKNCELDKNQRQCVEYALKARPLRRYIPKNQHQYKVWYVVNSTYFEYLMFVLILLNTICLAMQHYGQSCLFKIAMNILNMLFTGLFTVEMILKLIAFKPKGYFSDPWNVFDFLIVIGSIIDVILSETNHYFCDAWNTFDALIVVGSIVDIAITEVNPAEHTQCSPSMNAEENSRISITFFRLFRVMRLVKLLSRGEGIRTLLWTFIKSFQALPYVALLIVMLFFIYAVIGMQVFGKIALNDTTEINRNNNFQTFPQAVLLLFRCATGEAWQDIMLACMPGKKCAPESEPSNSTEGETPCGSSFAVFYFISFYMLCAFLIINLFVAVIMDNFDYLTRDWSILGPHHLDEFKRIWAEYDPEAKGRIKHLDVVTLLRRIQPPLGFGKLCPHRVACKRLVSMNMPLNSDGTVMFNATLFALVRTALRIKTEGNLEQANEELRAIIKKIWKRTSMKLLDQVVPPAGDDEVTVGKFYATFLIQEYFRKFKKRKEQGLVGKPSQRNALSLQAGLRTLHDIGPEIRRAISGDLTAEEELDKAMKEAVSAASEDDIFRRAGGLFGNHVSYYQSDGRSAFPQTFTTQRPLHINKAGSSQGDTESPSHEKLVDSTFTPSSYSSTGSNANINNANNTALGRLPRPAGYPSTVSTVEGHGPPLSPAIRVQEVAWKLSSNRERHVPVCEDLELRRDSGSAGTQAHCLLLRRANPSRCHSRESQAAMAGQEETSQDETYEVKMNHDTEACSEPSLLSTEMLSYQDDENRQLTLPEEDKRDIRQSPKRGFLRSASLGRRASFHLECLKRQKDRGGDISQKTVLPLHLVHHQALAVAGLSPLLQRSHSPASFPRPFATPPATPGSRGWPPQPVPTLRLEGVESSEKLNSSFPSIHCGSWAETTPGGGGSSAARRVRPVSLMVPSQAGAPGRQFHGSASSLVEAVLISEGLGQFAQDPKFIEVTTQELADACDMTIEEMESAADNILSGGAPQSPNGALLPFVNCRDAGQDRAGGEEDAGCVRARGAPSEEELQDSRVYVSSL

SEQ ID NO: 163 - protein, 372 aa, Homo sapiens
MMMMMMMKKMQHQRQQQADHANEANYARGTRLPLSGEGPTSQPNSSKQTVLSWQAAIDAARQAKAAQTMSTSAPPPVGSLSQRKRQQYAKSKKQGNSSNSRPARALFCLSLNNPIRRACISIVEWKPFDIFILLAIFANCVALAIYIPFPEDDSNSTNHNLEKVEYAFLIIFTVETFLKIIAYGLLLHPNAYVRNGWNLLDFVIVIVGLFSVILEQLTKETEGGNHSSGKSGGFDVKALRAFRVLRPLRLVSGVPSLQVVLNSIIKAMVPLLHIALLVLFVIIIYAIIGLELFIGKMHKTCFFADSDIVAEEDPAPCAFSGNGRQCTANGTECRSGWVGPNGGITNFDNFAFAMLTVFQCITMEGWTDVLYW

SEQ ID NO: 164 - protein, 20 aa, Homo sapiens
VNDAIGWEWPWVYFVSLIIL

SEQ ID NO: 165 - protein, 15 aa, Homo sapiens
GSFFVLNLVLGVLSG

SEQ ID NO: 166 - protein, 20 aa, Homo sapiens
VNDAIGWEWPWVYFVSLIIL

SEQ ID NO: 167 - protein, 407 aa, Homo sapiens
MMMMMMMKKMQHQRQQQADHANEANYARGTRLPLSGEGPTSQPNSSKQTVLSWQAAIDAARQAKAAQTMSTSAPPPVGSLSQRKRQQYAKSKKQGNSSNSRPARALFCLSLNNPIRRACISIVEWKPFDIFILLAIFANCVALAIYIPFPEDDSNSTNHNLEKVEYAFLIIFTVETFLKIIAYGLLLHPNAYVRNGWNLLDFVIVIVGLFSVILEQLTKETEGGNHSSGKSGGFDVKALRAFRVLRPLRLVSGVPSLQVVLNSIIKAMVPLLHIALLVLFVIIIYAIIGLELFIGKMHKTCFFADSDIVAEEDPAPCAFSGNGRQCTANGTECRSGWVGPNGGITNFDNFAFAMLTVFQCITMEGWTDVLYWMNDAMGFELPWVYFVSLVIFGSFFVLNLVLGVLSG

SEQ ID NO: 168 - protein, 463 aa, Homo sapiens; identical to SEQ ID NO: 127

SEQ ID NO: 169 - protein, 26 aa, Homo sapiens
RGTPAGMLDQKKGKFAWFSHSTETHV

SEQ ID NO: 170 - protein, 485 aa, Homo sapiens; identical to SEQ ID NO: 154

SEQ ID NO: 171 - protein, 327 aa, Homo sapiens; identical to SEQ ID NO: 138

SEQ ID NO: 172 - protein, 299 aa, Homo sapiens; identical to SEQ ID NO: 156

SEQ ID NO: 173 - protein, 19 aa, Homo sapiens
EGPSPSEAHQGAEDPFRPA

SEQ ID NO: 174 - protein, 239 aa, Homo sapiens; identical to SEQ ID NO: 158

SEQ ID NO: 175 - protein, 226 aa, Homo sapiens
RCHSRESQAAMAGQEETSQDETYEVKMNHDTEACSEPSLLSTEMLSYQDDENRQLTLPEEDKRDIRQSPKRGFLRSASLGRRASFHLECLKRQKDRGGDISQKTVLPLHLVHHQALAVAGLSPLLQRSHSPASFPRPFATPPATPGSRGWPPQPVPTLRLEGVESSEKLNSSFPSIHCGSWAETTPGGGGSSAARRVRPVSLMVPSQAGAPGRQFHGSASSLVEAV

SEQ ID NO: 176 - protein, 21 aa, Homo sapiens
GDSQMGRGERPRATRGLGMRG

SEQ ID NO: 177 - protein, 26 aa, Homo sapiens
RGTPAGMLDQKKGKFAWFSHSTETHV

SEQ ID NO: 178 - protein, 19 aa, Homo sapiens
EGPSPSEAHQGAEDPFRPA

SEQ ID NO: 179 - protein, 21 aa, Homo sapiens
GDSQMGRGERPRATRGLGMRG

SEQ ID NO: 180 - protein, 2123 aa, Homo sapiens
MVNENTRMYIPEENHQGSNYGSPRPAHANMNANAAAGLAPEHIPTPGAALSWQAAIDAARQAKLMGSAGNATISTVSSTQRKRQQYGKPKKQGSTTATRPPRALLCLTLKNPIRRACISIVEWKPFEIIILLTIFANCVALAIYIPFPEDDSNATNSNLERVEYLFLIIFTVEAFLKVIAYGLLFHPNAYLRNGWNLLDFIIVVVGLFSAILEQATKADGANALGGKGAGFDVKALRAFRVLRPLRLVSGVPSLQVVLNSIIKAMVPLLHIALLVLFVIIIYAIIGLELFMGKMHKTCYNQEGIADVPAEDDPSPCALETGHGRQCQNGTVCKPGWDGPKHGITNFDNFAFAMLTVFQCITMEGWTDVLYWVNDAVGRDWPWIYFVTLIIIGSFFVLNLVLGVLSGEFSKEREKAKARGDFQKLREKQQLEEDLKGYLDWITQAEDIDPENEDEGMDEEKPRNMSMPTSETESVNTENVAGGDIEGENCGARLAHRISKSKFSRYWRRWNRFCRRKCRAAVKSNVFYWLVIFLVFLNTLTIASEHYNQPNWLTEVQDTANKALLALFTAEMLLKMYSLGLQAYFVSLFNRFDCFVVCGGILETILVETKIMSPLGISVLRCVRLLRIFKITRYWNSLSNLVASLLNSVRSIASLLLLLFLFIIIFSLLGMQLFGGKFNFDEMQTRRSTFDNFPQSLLTVFQILTGEDWNSVMYDGIMAYGGPSFPGMLVCIYFIILFICGNYILLNVFLAIAVDNLADAESLTSAQKEEEEEKERKKLARTASPEKKQELVEKPAVGESKEEKIELKSITADGESPPATKINMDDLQPNENEDKSPYPNPETTGEEDEEEPEMPVGPRPRPLSELHLKEKAVPMPEASAFFIFSSNNRFRLQCHRIVNDTIFTNLILFFILLSSISLAAEDPVQHTSFRNHILFYFDIVFTTIFTIEIALKILGNADYVFTSIFTLEIILKMTAYGAFLHKGSFCRNYFNILDLLVVSVSLISFGIQSSAINVVKILRVLRVLRPLRAINRAKGLKHVVQCVFVAIRTIGNIVIVTTLLQFMFACIGVQLFKGKLYTCSDSSKQTEAECKGNYITYKDGEVDHPIIQPRSWENSKFDFDNVLAAMMALFTVSTFEGWPELLYRSIDSHTEDKGPIYNYRVEISIFFIIYIIIIAFFMMNIFVGFVIVTFQEQGEQEYKNCELDKNQRQCVEYALKARPLRRYIPKNQHQYKVWYVVNSTYFEYLMFVLILLNTICLAMQHYGQSCLFKIAMNILNMLFTGLFTVEMILKLIAFKPKGYFSDPWNVFDFLIVIGSIIDVILSETNHYFCDAWNTFDALIVVGSIVDIAITEVNPAEHTQCSPSMNAEENSRISITFFRLFRVMRLVKLLSRGEGIRTLLWTFIKSFQALPYVALLIVMLFFIYAVIGMQVFGKIALNDTTEINRNNNFQTFPQAVLLLFRCATGEAWQDIMLACMPGKKCAPESEPSNSTEGETPCGSSFAVFYFISFYMLCAFLIINLFVAVIMDNFDYLTRDWSILGPHHLDEFKRIWAEYDPEAKGRIKHLDVVTLLRRIQPPLGFGKLCPHRVACKRLVSMNMPLNSDGTVMFNATLFALVRTALRIKTEGNLEQANEELRAIIKKIWKRTSMKLLDQVVPPAGDDEVTVGKFYATFLIQEYFRKFKKRKEQGLVGKPSQRNALSLQAGLRTLHDIGPEIRRAISGDLTAEEELDKAMKEAVSAASEDDIFRRAGGLFGNHVSYYQSDGRSAFPQTFTTQRPLHINKAGSSQGDTESPSHEKLVDSTFTPSSYSSTGSNANINNANNTALGRLPRPAGYPSTVSTVEGHGPPLSPAIRVQEVAWKLSSNRERHVPVCEDLELRRDSGSAGTQAHCLLLRRANPSRCHSRESQAAMAGQEETSQDETYEVKMNHDTEACSEPSLLSTEMLSYQDDENRQLTLPEEDKRDIRQSPKRGFLRSASLGRRASFHLECLKRQKDRGGDISQKTVLPLHLVHHQALAVAGLSPLLQRSHSPASFPRPFATPPATPGSRGWPPQPVPTLRLEGVESSEKLNSSFPSIHCGSWAETTPGGGGSSAARRVRPVSLMVPSQAGAPGRQFHGSASSLVEAV

SEQ ID NO: 181 - protein, 407 aa, Homo sapiens; identical to SEQ ID NO: 167

SEQ ID NO: 182 - protein, 407 aa, Homo sapiens; identical to SEQ ID NO: 167

SEQ ID NO: 183 - protein, 636 aa, Homo sapiens
MMMMMMMKKMQHQRQQQADHANEANYARGTRLPLSGEGPTSQPNSSKQTVLSWQAAIDAARQAKAAQTMSTSAPPPVGSLSQRKRQQYAKSKKQGNSSNSRPARALFCLSLNNPIRRACISIVEWKPFDIFILLAIFANCVALAIYIPFPEDDSNSTNHNLEKVEYAFLIIFTVETFLKIIAYGLLLHPNAYVRNGWNLLDFVIVIVGLFSVILEQLTKETEGGNHSSGKSGGFDVKALRAFRVLRPLRLVSGVPSLQVVLNSIIKAMVPLLHIALLVLFVIIIYAIIGLELFIGKMHKTCFFADSDIVAEEDPAPCAFSGNGRQCTANGTECRSGWVGPNGGITNFDNFAFAMLTVFQCITMEGWTDVLYWMNDAMGFELPWVYFVSLVIFGSFFVLNLVLGVLSGEFSKEREKAKARGDFQKLREKQQLEEDLKGYLDWITQAEDIDPENEEEGGEEGKRNTSMPTSETESVNTENVSGEGENRGCCGSLCQAISKSKLSRRWRRWNRFNRRRCRAAVKSVTFYWLVIVLVFLNTLTISSEHYNQPDWLTQIQDIANKVLLALFTCEMLVKMYSLGLQAYFVSLFNRFDCFVVCGGITETILVELEIMSPLGISVFRCVRLLRIFKVTRHWTSL

SEQ ID NO: 184 - protein, 695 aa, Homo sapiens
ASLLLLLFLFIIIFSLLGMQLFGGKFNFDETQTKRSTFDNFPQALLTVFQILTGEDWNAVMYDGIMAYGGPSSSGMIVCIYFIILFICGNYILLNVFLAIAVDNLADAESLNTAQKEEAEEKERKKIARKESLENKKNNKPEVNQIANSDNKVTIDDYREEDEDKDPYPPCDVPVGEEEEEEEEDEPEVPAGPRPRRISELNMKEKIAPIPEGSAFFILSKTNPIRVGCHKLINHHIFTNLILVFIMLSSAALAAEDPIRSHSFRNTILGYFDYAFTAIFTVEILLKMTTFGAFLHKGAFCRNYFNLLDMLVVGVSLVSFGIQSSAISVVKILRVLRVLRPLRAINRAKGLKHVVQCVFVAIRTIGNIMIVTTLLQFMFACIGVQLFKGKFYRCTDEAKSNPEECRGLFILYKDGDVDSPVVRERIWQNSDFNFDNVLSAMMALFTVSTFEGWPALLYKAIDSNGENIGPIYNHRVEISIFFIIYIIIVAFFMMNIFVGFVIVTFQEQGEKEYKNCELDKNQRQCVEYALKARPLRRYIPKNPYQYKFWYVVNSSPFEYMMFVLIMLNTLCLAMQHYEQSKMFNDAMDILNMVFTGVFTVEMVLKVIAFKPKGYFSDAWNTFDSLIVIGSIIDVALSEADPTESENVPVPTATPGNSEESNRISITFFRLFRVMRLVKLLSRGEGIRTLLWTFIK

SEQ ID NO: 185 - protein, 86 aa, Homo sapiens
FQALPYVALLIAMLFFIYAVIGMQMFGKVAMRDNNQINRNNNFQTFPQAVLLLFRCATGEAWQEIMLACLPGKLCDPESDYNPGEE

SEQ ID NO: 186 - protein, 369 aa, Homo sapiens
TCGSNFAIVYFISFYMLCAFLIINLFVAVIMDNFDYLTRDWSILGPHHLDEFKRIWSEYDPEAKGRIKHLDVVTLLRRIQPPLGFGKLCPHRVACKRLVAMNMPLNSDGTVMFNATLFALVRTALKIKTEGNLEQANEELRAVIKKIWKKTSMKLLDQVVPPAGDDEVTVGKFYATFLIQDYFRKFKKRKEQGLVGKYPAKNTTIALQAGLRTLHDIGPEIRRAISCDLQDDEPEETKREEEDDVFKRNGALLGNHVNHVNSDRRDSLQQTNTTHRPLHVQRPSIPPASDTEKPLFPPAGNSVCHNHHNHNSIGKQVPTSTNANLNNANMSKAAHGKRPSIGNLEHVSENGHHSSHKHDREPQRRSSVK

SEQ ID NO: 187 - protein, 350 aa, Homo sapiens
RSDSGDEQLPTICREDPEIHGYFRDPHCLGEQEYFSSEECYEDDSSPTWSRQNYGYYSRYPGRNIDSERPRGYHHPQGFLEDDDSPVCYDSRRSPRRRLLPPTPASHRRSSFNFECLRRQSSQEEVPSSPIFPHRTALPLHLMQQQIMAVAGLDSSKAQKYSPSHSTRSWATPPATPPYRDWTPCYTPLIQVEQSEALDQVNGSLPSLHRSSWYTDEPDISYRTFTPASLTVPSSFRNKNSDKQRSADSLVEAVLISEGLGRYARDPKFVSATKHEIADACDLTIDEMESAASTLLNGNVRPRANGDVGPLSHRQDYELQDFGPGYSDEEPDPGRDEEDLADEMICITTL

SEQ ID NO: 188 - protein, 2161 aa, Homo sapiens [sequence omitted]

SEQ ID NO: 189 - protein, 34 aa, Homo sapiens
MQDAMGYELPWVYFVSLVIFGSFFVLNLVLGVLS

SEQ ID NO: 190 - protein, 34 aa, Homo sapiens
VNDAVGRDWPWIYFVTLIIIGSFFVLNLVLGVLS

SEQ ID NO: 191 - protein, 12 aa, Homo sapiens
NLVASLLNSMKS

What is claimed is:

1. An isolated polynucleotide comprising a nucleic acid sequence according to any of SEQ ID NO 23-44, or the complement thereof.

2. The isolated nucleic acid of claim 1, wherein said nucleic acid comprises a polynucleotide encoding for the amino acid sequence of any of SEQ ID NOs 1-22.

3. The isolated nucleic acid of claim 1, wherein said nucleotide sequence encodes for a polypeptide consisting of the amino acid sequence of any of SEQ ID NOs 1-22.

4. An isolated polypeptide comprising a polypeptide according to any of SEQ ID NOs 1-22.

5. The polypeptide of claim 4, wherein said polypeptide consists of the amino acid sequence according to any of SEQ ID NOs 1-22.

6. An expression vector comprising a nucleotide sequence encoding for any of SEQ ID NOs 1-22, wherein said nucleotide sequence is transcriptionally coupled to an exogenous promoter.

7. The expression vector of claim 6, wherein said nucleotide sequence encodes for a polypeptide consisting of the amino acid sequence according to any of SEQ ID NOs 1-22.

8. The expression vector of claim 6, wherein said nucleotide sequence comprises any of SEQ ID NO 23-44.

9. The expression vector of claim 6, wherein said nucleotide sequence consists of the sequence of any of SEQ ID NO 23-44.

10. A recombinant cell comprising the expression vector of claim 6, wherein said cell comprises an RNA polymerase recognized by said promoter.

11. A recombinant cell made by a process comprising the step of introducing the expression vector of claim 6 into said cell.

12. A method of preparing a splice variant polypeptide comprising growing the recombinant cell of claim 10 under conditions wherein said polypeptide is expressed from said expression vector.

13. A method of screening for compounds able to bind selectively to a splice variant according to the present invention comprising the steps of: (a) providing a splice variant polypeptide according to claim 4; (b) providing a WT protein polypeptide that is not said splice variant polypeptide, (c) contacting said splice variant polypeptide and said WT polypeptide with a test preparation comprising one or more compounds; and (d) determining the binding of said test preparation to said splice variant polypeptide and said WT polypeptide, wherein a test preparation which binds said splice variant polypeptide but does not bind said WT polypeptide contains a compound that selectively binds said splice variant polypeptide.

14. The method of claim 13, wherein said splice variant polypeptide is obtained by expression of said polypeptide from an expression vector comprising a polynucleotide encoding the amino acid sequence according to any of SEQ ID NOs 1-22.

15. The method of claim 14, wherein said polypeptide consists of the amino acid sequence according to any of SEQ ID NOs 1-22.

16. A method of screening for a compound able to bind to or interact with a splice variant protein or a fragment thereof comprising the steps of: (a) expressing a polypeptide comprising the amino acid sequence according to claim 4 or fragment thereof from a recombinant nucleic acid; (b) providing to said polypeptide a labeled ligand that specifically binds to said polypeptide and a test preparation comprising one or more compounds; and (c) measuring the effect of said test preparation on binding of said labeled ligand to said polypeptide, wherein a test preparation that alters the binding of said labeled ligand to said polypeptide contains a compound that binds to or interacts with said polypeptide.

17. The method of claim 16, wherein said steps (b) and (c) are performed in vitro.

18. The method of claim 16, wherein said steps (a), (b) and (c) are preformed using a whole cell.

19. The method of claim 16, wherein said polypeptide is expressed from an expression vector.

20. The method of claim 16, wherein said ligand is a calcium channel-binder.

21. The method of claim 20, wherein said polypeptide consists of an amino acid sequence according to any of SEQ ID NOs 1-22 or a fragment thereof.

22. The method of claim 20, wherein said test preparation contains one compound.
